(19) United States
(12) Patent Application Publication
(10) Pub. No.: US 2021/0261649 A1
(43) Pub. Date: Aug. 26, 2021

(54) COMPOSITIONS AND METHODS FOR ANTIBODY DELIVERY

(71) Applicant: Krystal Biotech, Inc., Pittsburgh, PA (US)

(72) Inventors: Trevor PARRY, San Diego, CA (US); Pooja AGARWAL, Mars, PA (US); Suma KRISHNAN, San Francisco, CA (US)

(73) Assignee: Krystal Biotech, Inc,, Pittsburgh, PA (US)

(21) Appl. No.: 17/255,383

(22) PCT Filed: Jun. 28, 2019
(86) PCT No.: PCT/US2019/039939

§ 371 Date: Dec. 22, 2020

Related U.S. Application Data
(60) Provisional application No. 62/713,066, filed on Aug. 1, 2018.
(60) Provisional application No. 62/692,514, filed on Jun. 29, 2018.

(51) Int. Cl. C07K 16/08; C12N 7/00

(52) U.S. Cl. CPC C07K 16/087; C12N 7/00; C07K 2317/569; C12N 2710/16643; C07K 2317/75; C07K 2317/76; C12N 2710/16662

(57) ABSTRACT

The present disclosure provides recombinant nucleic acids (e.g., recombinant herpes viral genomes) comprising one or more polynucleotides encoding an antibody; viruses (e.g., herpes viruses) comprising the recombinant nucleic acids; compositions comprising the recombinant nucleic acids and/or viruses; methods of their use (e.g., for localized, virus-mediated delivery and expression of the encoded antibody); and articles of manufacture or kits thereof.

### CROSS REFERENCE TO RELATED APPLICATIONS

[0001] This application claims the priority benefit of U.S. Provisional Application Ser. No. 62/692,514, filed Jun. 29, 2018, and U.S. Provisional Application Ser. No. 62/713,066, filed Aug. 1, 2018, which are each incorporated herein by reference in their entirety.

### SUBMISSION OF SEQUENCE LISTING ON ASCII TEXT FILE

[0002] The content of the following submission on ASCII text file is incorporated herein by reference in its entirety: a computer readable form (CRF) of the Sequence Listing (file name: 761342000840SEQLIST.txt, date recorded: Jun. 27, 2019, size: 764 KB).

### FIELD OF THE INVENTION

[0003] The present disclosure relates, in part, to recombinant nucleic acids (e.g., recombinant herpes viral genomes) comprising one or more polynucleotides encoding an antibody (or a portion thereof); to viruses (e.g., herpes viruses) comprising the recombinant nucleic acids; to compositions comprising the recombinant nucleic acids and/or viruses; to methods of their use (e.g., for localized, virus-mediated delivery and expression of the encoded antibody); and to articles of manufacture or kits thereof.

### BACKGROUND

[0004] In recent years, therapeutic antibodies have become one of the commercially most successful classes of biopharmaceutical drugs. While antibodies have shown success in the treatment of several major diseases including autoimmune, cardiovascular, and infectious diseases, cancer, and inflammation, systemic administration of therapeutic antibodies has a number of functional limitations, including inadequate pharmacokinetics and tissue accessibility. In addition, systemic exposure to certain antibodies has been shown to repress the immune system, exposing the patient to significant risk of infections and other complications. Accordingly, there is need for alternative strategies to administer therapeutic antibodies to patients in need thereof.

[0005] All references cited herein, including patent applications, patent publications, non-patent literature, and UniProtKB/Swiss-Prot Accession numbers are herein incorporated by reference in their entirety, as if each individual reference were specifically and individually indicated to be incorporated by reference.

### BRIEF SUMMARY

[0006] In some embodiments, provided herein are recombinant nucleic acids (e.g., recombinant herpes viral genomes) encoding antibodies (e.g., full-length antibodies, antibody fragments, etc.) for use in viruses (e.g., herpes viruses), compositions, formulations, medicaments, and/or methods useful for delivering (e.g., topically, intraarticularly, intravitreally, etc.) antibodies to one or more sites and/or tissues of a subject. The present inventors have shown that the recombinant, attenuated viruses described herein were capable of 1) expressing both full-length antibodies and antibody fragments (scFv-Fcs), 2) encoding and delivering mouse, chimeric, and fully human antibodies (of various IgG isotypes), and 3) inducing dose-dependent secretion of the encoded antibodies from human cells, which were functional (see e.g., Example 2). Moreover, the present inventors have shown that the viruses described herein may be used to successfully express their encoded antibodies in vivo after localized administration (see e.g., Example 3). Furthermore, the present inventors have shown that the viruses described herein may be used to successfully express a therapeutic antibody to treat one or more signs of an inflammatory skin condition (atopic dermatitis) after topical administration (see e.g., Example 3). Without wishing to be bound by theory, it is believed that the recombinant nucleic acids (e.g., recombinant viral genomes), viruses, pharmaceutical compositions, medicaments, and/or methods described herein provide a novel system for delivering therapeutic antibodies to a patient. Specifically, without wishing to be bound by theory, it is believed that the recombinant herpes viruses described herein provide a unique system to locally administer a therapeutic antibody to a subject in order to: 1) improve antibody pharmacokinetics at the site of interest; 2) increase antibody tissue accessibility and/or infiltration; 3) reduce the total dose of the antibody administered to the subject; 4) provide a less invasive or non-invasive method of administering an antibody to the subject; and/or 5) reduce or eliminate systemic exposure of the subject to the antibody (e.g., to avoid one or more side-effects (such as global immune suppression) observed after systemic administration of certain antibodies).

[0007] Accordingly, certain aspects of the present disclosure relate to a recombinant herpes virus genome comprising one or more polynucleotides encoding an antibody. In some embodiments, the antibody is an antibody fragment. In some embodiments, the antibody fragment is a Fab, Fab′ Fab′-SH, F(ab′)2, Fv, scFv, or scFv-Fc fragment. In some embodiments, the antibody fragment is an scFv-Fc fragment. In some embodiments, the scFv-Fc comprises the Fc region of an IgG antibody (e.g., the Fc region of an IgG1, IgG2, IgG3, or IgG4 antibody). In some embodiments, the scFv-Fc comprises the Fc region of an IgG1 antibody. In some embodiments, the scFv-Fc comprises the Fc region of an IgG4 antibody. In some embodiments, the antibody is a full-length antibody. In some embodiments that may be combined with any of the preceding embodiments, the antibody is a murine antibody, a chimeric antibody, a humanized antibody, a human antibody, a monoclonal antibody, or a multispecific antibody. In some embodiments that may be combined with any of the preceding embodiments, the antibody is an IgA, IgD, IgE, IgG, or IgM antibody. In some embodiments that may be combined with any of the preceding embodiments, the antibody is an IgG antibody. In some embodiments, the IgG antibody is an IgG1, IgG2, IgG3, or IgG4 antibody. In some embodiments, the IgG antibody is an IgG1 antibody. In some embodiments, the IgG antibody is an IgG4 antibody. In some embodiments that may be combined with any of the preceding embodiments, the antibody is an agonist antibody or an antagonist antibody. In some embodiments, the antibody is an agonist antibody. In some embodiments, the antibody is an antagonist antibody.

[0008] In some embodiments that may be combined with any of the preceding embodiments, the antibody comprises a heavy chain variable region comprising an HVR-H1, an HVR-H2, and an HVR-H3, wherein the HVR-H1 comprises a sequence selected from SEQ ID NOS: 1-59, the HVR-H2 comprises a sequence selected from SEQ ID NOS: 60-122, and/or the HVR-H3 comprises a sequence selected from SEQ ID NOS: 123-185. In some embodiments that may be combined with any of the preceding embodiments, the antibody comprises a light chain variable region comprising an HVR-L1, an HVR-L2, and an HVR-L3, wherein the HVR-L1 comprises a sequence selected from SEQ ID NOS: 186-242, the HVR-L2 comprises a sequence selected from SEQ ID NOS: 243-294, and/or the HVR-L3 comprises a sequence selected from SEQ ID NOS: 295-354.

[0009] In some embodiments that may be combined with any of the preceding embodiments, the antibody comprises a heavy chain variable region comprising a sequence having at least 85%, at least 90%, at least 91%, at least 92%, at least 93%, at least 94%, at least 95%, at least 96%, at least 97%, at least 98%, at least 99%, or 100% sequence identity to an amino acid sequence selected from SEQ ID NOS: 355-419 or 614-865. In some embodiments that may be combined with any of the preceding embodiments, the antibody comprises a light chain variable region comprising a sequence having at least 85%, at least 90%, at least 91%, at least 92%, at least 93%, at least 94%, at least 95%, at least 96%, at least 97%, at least 98%, at least 99%, or 100% sequence identity to an amino acid sequence selected from SEQ ID NOS: 420-482 or 866-1116. In some embodiments that may be combined with any of the preceding embodiments, the antibody comprises: (a) a heavy chain variable region comprising a sequence having at least 85%, at least 90%, at least 91%, at least 92%, at least 93%, at least 94%, at least 95%, at least 96%, at least 97%, at least 98%, at least 99%, or 100% sequence identity to an amino acid sequence selected from SEQ ID NOS: 355-419 or 614-865; and (b) a light chain variable region comprising a sequence having at least 85%, at least 90%, at least 91%, at least 92%, at least 93%, at least 94%, at least 95%, at least 96%, at least 97%, at least 98%, at least 99%, or 100% sequence identity to an amino acid sequence selected from SEQ ID NOS: 420-482 or 866-1116.

[0010] In some embodiments that may be combined with any of the preceding embodiments, the antibody is selected from abagovomab, abciximab, abituzumab, abrezekimab, abrilumab, actoxumab, adalimumab, adecatumumab, aducanumab, afasevikumab, afelimomab, afutuzumab, alacizumab, alemtuzumab, alirocumab, altumomab, amatuximab, anatumomab, andecaliximab, anetumab, anifrolumab, anrukinzumab, apolizumab, aprutumab, arcitumomab, ascrinvacumab, aselizumab, atezolizumab, atinumab, atlizumab, atorolimumab, avelumab, azintuxizumab, bapineuzumab, basiliximab, bavituximab, bectumomab, begelomab, belantamab, belimumab, bemarituzumab, belimumab, bemaritzumab, benralizumab, berlimatoxumab, bersanlimab, bertilimumab, besilesomab, bevacizumab, bezlotoxumab, biciromab, bimagrumab, bimekizumab, birtamimab, bivatuzumab, bleselumab, blinatumomab, blontuvetmab, blosozumab, bococizumab, brazikumab, brentuximab, briakinumab, brodalumab, brolucizumab, brontictuzumab, burosumab, cabiralizumab, camidanlumab, camrelizumab, canakinumab, cantuzumab, caplacizumab, capromab, carlumab, carotuximab, catumaxomab, cedelizumab, cemiplimab, cergutuzumab, certolizumab, cetrelimab, cetuximab, cibisatamab, citatuzumab, cixutumumab, clazakizumab, clenoliximab, clivatuzumab, codrituzumab, cofetuzumab, coltuximab, conatumumab, concizumab, cosfroviximab, crenezumab, crizanlizumab, crotedumab, cusatuzumab, dacetuzumab, daclizumab, dalotuzumab, dapirolizumab, daratumumab, dectrekumab, demcizumab, denintuzumab, denosumab, depatuxizumab, derlotuximab, detumomab, dezamizumab, dinutuximab, diridavumab, domagrozumab, dorlimomab, drozitumab, duligotuzumab, dupilumab, durvalumab, dusigitumab, duvortuxizumab, ecromeximab, eculizumab, edobacomab, edrecolomab, efalizumab, efungumab, eldelumab, elezanumab, elgemtumab, elotuzumab, elsilimomab, emactuzumab, emapalumab, emibetuzumab, emicizumab, enapotamab, enavatuzumab, enfortumab, enlimomab, enoblituzumab, enokizumab, enoticumab, ensituximab, epitumomab, epratuzumab, eptinezumab, erenumab, erlizumab, ertumaxomab, etaracizumab, etigilimab, etrolizumab, evinacumab, evolocumab, exbivirumab, fanolesomab, faralimomab, faricimab, farletuzumab, fasinumab, felvizumab fezakinumab, fibatuzumab, ficlatuzumab, figitumumab, firivumab, flanvotumab, fletikumab, flotetuzumab, fontolizumab, foralumab, foravirumab, fremanezumab, fresolimumab, frunevetmab, fulranumab, futuximab, galcanezumab, galiximab, gancotamab, ganitumab, gantenerumab, gatipotuzumab, gavilimomab, gedivumab, gemtuzumab, gevokizumab, gilvetmab, gimsilumab, girentuximab, glembatumumab, golimumab, gomiliximab, gosuranemab, guselkumab, ianalumab, ibalizumab, ibritumomab, icrucumab, idarucizumab, ifabotuzumab, igovomab, iladatuzumab, imalumab, imaprelimab, imciromab, imgatuzumab, inclacumab, indatuximab, indusatumab, inebilizumab, inflectra, infliximab, intetumumab, inolimomab, inotuzumab, ipilimumab, iratumumab, isatuximab, iscalimab, istiratumab, itolizumab, ixekizumab, keliximab, labetuzumab, lacnotuzumab, ladiratuzumab, lampalizumab, lanadelumab, landogrozumab, laprituximab, larcaviximab, lebrikizumab, lemalesomab, lendalizumab, lenvervimab, lenzilumab, lerdelimumab, leronlimab, lesofavumab, letolizumab, lexatumumab, libivirumab, lifastuzumab, ligelizumab, loncastuximab, losatuxizumab, lilotomab, lintuzumab, lirilumab, lodelcizumab, lokivetmab, lorvotuzumab, lucatumumab, lulizumab, lumiliximab, lumretuzumab, lupartumab, lutikizumab, mapatumumab, margetuximab, marstacimab, maslimomab, mavrilimumab, matuzumab, mepolizumab, metelimumab, milatuzumab, minretumomab, mirikizumab, mirvetuximab, mitumomab, modotuximab, mogamulizumab, monalizumab, morolimumab, mosunetuzumab, motavizumab, moxetumomab, nacolomab, namilumab, naptumomab, naratuximab, narnatumab, natalizumab, navicixizumab, navivumab, naxitamab, nebacumab, necitumumab, nemolizumab, nerelimomab, nesvacumab, netakimab, nimotuzumab, nirsevimab, nivolumab, nofetumomab, obiltoxaximab, obinutuzumab, ocaratuzumab, ocrelizumab, odulimomab, ofatumumab, olaratumab, oleclumab, olendalizumab, olokizumab, omalizumab, onartuzumab, ontuxizumab, onvatilimab, opicinumab, oportuzumab, oregovomab, orticumab, otelixizumab, otilimab, otlertuzumab, oxelumab, ozanezumab, ozoralizumab, pagibaximab, palivizumab, pamrevlumab, panitumumab, pankomab, panobacumab, parsatuzumab, pascolizumab, pasotuxizumab, pateclizumab, patritumab, pembrolizumab, pemtumomab, perakizumab, pertuzumab, pexelizumab, pidilizumab, pinatuzumab, pintumomab, placulumab, plozalizumab, pogalizumab, polatuzumab, ponezumab, porgaviximab, prasinezumab, prezalizumab, priliximab, pritoxaximab, pritumumab, quilizumab, racotumomab, radretumab, rafivirumab, ralpancizumab, ramucirumab, ranevetmab, ranibizumab, raxibacumab, ravagalimab, ravulizumab, refanezumab, regavirumab, remtolumab, reslizumab, rilotumumab, rinucumab, risankizumab, rituximab, rivabazumab, robatumumab, roledumab, romilkimab, romosozumab, rontalizumab, rosmantuzumab, rovalpituzumab, rovelizumab, rozanolixizumab, ruplizumab, sacituzumab, samalizumab, samrotamab, sapelizumab, sarilumab, satralizumab, satumomab, secukinumab, selicrelumab, seribantumab, setoxaximab, setrusumab, sevirumab, sibrotuzumab, sifalimumab, siltuximab, simtuzumab, siplizumab, sirtratumab, sirukumab, sofituzumab, solanezumab, solitomab, sonepcizumab, sontuzumab, spartalizumab, stamulumab, sulesomab, suptavumab, sutimlimab, suvizumab, suvratoxumab, tabalumab, tacatuzumab, tadocizumab, talacotuzumab, talizumab, tamtuvetmab, tanezumab, taplitumomab, tarextumab, tavolimab, tefibazumab, telimomab, telisotuzumab, tenatumomab, teneliximab, teplizumab, tepoditamab, teprotumumab, tesidolumab, tetulomab, tezepelumab, tibulizumab, tildrakizumab, tigatuzumab, timigutuzumab, timolumab, tiragotumab, tislelizumab, tisotumab, tocilizumab, tomuzotuximab, toralizumab, tosatoxumab, tositumomab, tovetumab, tralokinumab, trastuzumab, tregalizumab, tremelimumab, trevogrumab, tucotuzumab, tuvirumab, ublituximab, ulocuplumab, urelumab, urtoxazumab, ustekinumab, utomilumab, vadastuximab, vanalimab, vandortuzumab, vantictumab, vanucizumab, vapaliximab, varisacumab, varlilumab, vatelizumab, vedolizumab, veltuzumab, vepalimomab, vesencumab, visilizumab, vobarilizumab, volociximab, vonlerolizumab, vopratelimab, vorsetuzumab, votumumab, vunakizumab, xentuzumab, zalutumumab, zanolimumab, zatuximab, zenocutuzumab, ziralimumab, zolbetuximab, and zolimomab.

[0011] In some embodiments that may be combined with any of the preceding embodiments, the recombinant herpes virus genome is replication competent. In some embodiments that may be combined with any of the preceding embodiments, the recombinant herpes virus genome is replication defective. In some embodiments that may be combined with any of the preceding embodiments, the recombinant herpes virus genome is selected from a recombinant herpes simplex virus genome, a recombinant varicella zoster virus genome, a recombinant human cytomegalovirus genome, a recombinant herpesvirus 6A genome, a recombinant herpesvirus 6B genome, a recombinant herpesvirus 7 genome, a recombinant Kaposi's sarcoma-associated herpesvirus genome, and any derivatives thereof.

[0012] In some embodiments that may be combined with any of the preceding embodiments, the recombinant herpes virus genome is a recombinant herpes simplex virus genome. In some embodiments, the recombinant herpes simplex virus genome is a recombinant type 1 herpes simplex virus (HSV-1) genome, a recombinant type 2 herpes simplex virus (HSV-2) genome, or any derivatives thereof. In some embodiments, the recombinant herpes simplex virus genome is a recombinant type 1 herpes simplex virus (HSV-1) genome. In some embodiments, the recombinant herpes simplex virus genome comprises an inactivating mutation. In some embodiments, the inactivating mutation is in a herpes simplex virus gene. In some embodiments, the inactivating mutation is a deletion of the coding sequence of the herpes simplex virus gene. In some embodiments, the herpes simplex virus gene is selected from Infected Cell Protein (ICP) 0, ICP4, ICP22, ICP27, ICP47, thymidine kinase (tk), Long Unique Region (UL) 41, and UL55. In some embodiments that may be combined with any of the preceding embodiments, the recombinant herpes simplex virus genome comprises an inactivating mutation in one or both copies of the ICP4 gene. In some embodiments that may be combined with any of the preceding embodiments, the recombinant herpes simplex virus genome comprises an inactivating mutation in the ICP22 gene. In some embodiments that may be combined with any of the preceding embodiments, the recombinant herpes simplex virus genome comprises an inactivating mutation in the UL41 gene. In some embodiments that may be combined with any of the preceding embodiments, the recombinant herpes simplex virus genome comprises an inactivating mutation in one or both copies of the ICP0 gene. In some embodiments that may be combined with any of the preceding embodiments, the recombinant herpes simplex virus genome comprises an inactivating mutation in the ICP27 gene. In some embodiments that may be combined with any of the preceding embodiments, the recombinant herpes simplex virus genome comprises an inactivating mutation in the UL55 gene. In some embodiments that may be combined with any of the preceding embodiments, the recombinant herpes simplex virus genome comprises an inactivating mutation in the Joint region. In some embodiments, the recombinant herpes simplex virus genome comprises a deletion of the Joint region. In some embodiments that may be combined with any of the preceding embodiments, the recombinant herpes simplex virus genome comprises the one or more polynucleotides within one or both of the ICP4 viral gene loci.

[0013] In some embodiments that may be combined with any of the preceding embodiments, the recombinant herpes virus genome has reduced cytotoxicity when introduced into a target cell, as compared to a corresponding wild-type herpes virus genome. In some embodiments, the target cell is a human cell.

[0014] Other aspects of the present disclosure relate to a herpes virus comprising any of the recombinant herpes virus genomes described herein. In some embodiments, the herpes virus is replication competent. In some embodiments, the herpes virus is replication defective. In some embodiments, the herpes virus is attenuated. In some embodiments that may be combined with any of the preceding embodiments, the herpes virus has reduced cytotoxicity as compared to a corresponding wild-type herpes virus. In some embodiments that may be combined with any of the preceding embodiments, the herpes virus is selected from a herpes simplex virus, a varicella zoster virus, a human cytomegalovirus, a herpesvirus 6A, a herpesvirus 6B, a herpesvirus 7, and a Kaposi's sarcoma-associated herpesvirus. In some embodiments that may be combined with any of the preceding embodiments, the herpes virus is a herpes simplex virus. In some embodiments, the herpes simplex virus is a type 1 herpes simplex virus (HSV-1), a type 2 herpes simplex virus (HSV-2), or any derivatives thereof. In some embodiments, the herpes simplex virus is a type 1 herpes simplex virus (HSV-1).

[0015] Other aspects of the present disclosure relate to a pharmaceutical composition comprising: (a) any of the recombinant herpes virus genomes described herein and/or any of the herpes viruses described herein; and (b) a pharmaceutically acceptable excipient. In some embodiments, the pharmaceutical composition is suitable for topical, transdermal, subcutaneous, intradermal, transmucosal, oral, intranasal, intratracheal, sublingual, nasal, buccal, rectal, vaginal, intravenous, intraarterial, intramuscular, intracardiac, intraosseous, intraperitoneal, intraorbital, intravitreal, subconjunctival, suprachoroidal, subretinal, intraarticular, peri-articular, local, epicutaneous, and/or inhaled administration. In some embodiments, the pharmaceutical composition is suitable for topical administration. In some embodiments, the pharmaceutical composition is suitable for inhaled administration. In some embodiments, the pharmaceutical composition is suitable for injection.

[0016] Other aspects of the present disclosure relate to the use of any of the recombinant herpes virus genomes, herpes viruses, and/or pharmaceutical compositions described herein as a medicament.

[0017] Other aspects of the present disclosure relate to the use of any of the recombinant herpes virus genomes, herpes viruses, and/or pharmaceutical compositions described herein in a therapy.

[0018] Other aspects of the present disclosure relate to the use of any of the recombinant herpes virus genomes, herpes viruses, and/or pharmaceutical compositions described herein in the manufacture of a medicament for treating a disease. In some embodiments, the disease is an inflammatory skin disease (e.g., atopic dermatitis). In some embodiments, the disease is selected from psoriasis, atopic dermatitis, pyoderma gangrenosum, a blistering disease, pemphigus, pemphigus vulgaris, pemphigus foliaceus, an autoimmune bullous skin disorder, bullous pemphigoid, Behçet's disease, cancer, hidradenitis suppurativa, arthritis, rheumatoid arthritis, psoriatic arthritis, osteoarthritis, juvenile idiopathic arthritis, ankylosing spondylitis, axial spondylarthritis, reactive arthritis, enteropathic arthritis, an autoimmune disease, asthma, thyroid eye disease, an infectious disease, and a neurological disease.

[0019] Other aspects of the present disclosure relate to a method of administering an antibody to a subject comprising administering to the subject an effective amount of any of the herpes viruses described herein and/or any of the pharmaceutical compositions described herein. In some embodiments, the herpes virus or pharmaceutical composition is administered topically, transdermally, subcutaneously, intradermally, transmucosally, orally, intranasally, intratracheally, sublingually, nasally, buccally, rectally, vaginally, intravenously, intraarterially, intramuscularly, intracardially, intraosseously, intraperitoneally, intraorbitally, intravitreally, subconjunctivally, suprachoroidally, subretinally, intraarticularly, peri-articularly, locally, epicutaneously, or via inhalation.

[0020] Other aspects of the present disclosure relate to a method of providing prophylactic, palliative, and/or therapeutic relief of one or more signs or symptoms of a disease in a subject comprising administering to the subject an effective amount of any of the herpes viruses described herein and/or any of the pharmaceutical compositions described herein. In some embodiments, the herpes virus or pharmaceutical composition is administered topically, transdermally, subcutaneously, intradermally, transmucosally, orally, intranasally, intratracheally, sublingually, nasally, buccally, rectally, vaginally, intravenously, intraarterially, intramuscularly, intracardially, intraosseously, intraperitoneally, intraorbitally, intravitreally, subconjunctivally, suprachoroidally, subretinally, intraarticularly, peri-articularly, locally, epicutaneously, or via inhalation. In some embodiments that may be combined with any of the preceding embodiments, the disease is selected from psoriasis, atopic dermatitis, pyoderma gangrenosum, a blistering disease, pemphigus, pemphigus vulgaris, pemphigus foliaceus, an autoimmune bullous skin disorder, bullous pemphigoid, Behçet's disease, cancer, hidradenitis suppurativa, arthritis, rheumatoid arthritis, psoriatic arthritis, osteoarthritis, juvenile idiopathic arthritis, ankylosing spondylitis, axial spondylarthritis, reactive arthritis, enteropathic arthritis, asthma, an autoimmune disease, thyroid eye disease, an infectious disease, and a neurological disease.

[0021] Other aspects of the present disclosure relate to a method of an antibody to the epidermis and/or dermis of a subject comprising topically, transdermally, subcutaneously, or intradermally administering to the subject an effective amount of any of the herpes viruses described herein and/or any of the pharmaceutical compositions described herein. In some embodiments, the skin of the subject is abraded or made more permeable prior to administration.

[0022] Other aspects of the present disclosure relate to a method of administering an antibody to the mucosa of a subject comprising topically, transmucosally, orally, sublingually, nasally, intranasally, via inhalation, or buccally administering to the subject an effective amount any of the herpes viruses described herein and/or any of the pharmaceutical compositions described herein.

[0023] Other aspects of the present disclosure relate to a method of administering an antibody to the airway and/or lungs of a subject comprising orally, sublingually, nasally, intranasally, intratracheally, via inhalation, or buccally administering to the subject an effective amount of any of the herpes viruses described herein and/or any of the pharmaceutical compositions described herein.

[0024] Other aspects of the present disclosure relate to a method of administering an antibody to one or more joints of a subject comprising intraarticularly and/or peri-articularly administering to the subject an effective amount any of the herpes viruses described herein and/or any of the pharmaceutical compositions described herein.

[0025] Other aspects of the present disclosure relate to a method of administering an antibody to one or both eyes of a subject comprising topically, intraorbitally, intravitreally, subconjunctivally, subretinally, or suprachoroidally administering to the subject an effective amount of any of the herpes viruses described herein and/or any of the pharmaceutical compositions described herein.

[0026] In some embodiments that may be combined with any of the preceding embodiments, the subject is a human. In some embodiments that may be combined with any of the preceding embodiments, the subject is not exposed to the antibody systemically.

[0027] Other aspects of the present disclosure relate to a recombinant herpes simplex virus (HSV) genome comprising one or more polynucleotides encoding an antibody. In some embodiments, the antibody is an antibody fragment. In some embodiments, the antibody fragment is a Fab, Fab′ Fab′-SH, F(ab′)2, Fv, scFv, or scFv-Fc fragment. In some embodiments, the antibody is a full-length antibody.

[0028] In some embodiments that may be combined with any of the preceding embodiments, the antibody is a murine antibody, a chimeric antibody, a humanized antibody, a human antibody, a monoclonal antibody, or a multispecific antibody. In some embodiments that may be combined with any of the preceding embodiments, the antibody is an IgA, IgD, IgE, IgG, or IgM antibody. In some embodiments that may be combined with any of the preceding embodiments, the antibody is an IgG antibody. In some embodiments, the IgG antibody is an IgG1, IgG2, IgG3, or IgG4 antibody. In some embodiments, the antibody is an agonist antibody. In some embodiments, the antibody is an antagonist antibody.

[0029] In some embodiments that may be combined with any of the preceding embodiments, the antibody comprises a heavy chain variable region comprising an HVR-H1, an HVR-H2, and an HVR-H3, wherein the HVR-H1 comprises a sequence selected from the group consisting of SEQ ID NOS: 1-59, the HVR-H2 comprises a sequence selected from the group consisting of SEQ ID NOS: 60-122, and/or the HVR-H3 comprises a sequence selected from the group consisting of SEQ ID NOS: 123-185. In some embodiments, the heavy chain variable region comprises a sequence having at least 85%, at least 90%, at least 91%, at least 92%, at least 93%, at least 94%, at least 95%, at least 96%, at least 97%, at least 98%, at least 99%, or 100% sequence identity to a sequence selected from the group consisting of SEQ ID NOS: 355-419. In some embodiments that may be combined with any of the preceding embodiments, the antibody comprises a light chain variable region comprising an HVR-L1, an HVR-L2, and an HVR-L3, wherein the HVR-L1 comprises a sequence selected from the group consisting of SEQ ID NOS: 186-242, the HVR-L2 comprises a sequence selected from the group consisting of SEQ ID NOS: 243-294, and/or the HVR-L3 comprises a sequence selected from the group consisting of SEQ ID NOS: 395-354. In some embodiments, the light chain variable region comprises a sequence having at least 85%, at least 90%, at least 91%, at least 92%, at least 93%, at least 94%, at least 95%, at least 96%, at least 97%, at least 98%, at least 99%, or 100% sequence identity to a sequence selected from SEQ ID NOS: 420-482.

[0030] In some embodiments that may be combined with any of the preceding embodiments, the recombinant genome is a recombinant HSV-1 genome, a recombinant HSV-2 genome, or any derivatives thereof. In some embodiments that may be combined with any of the preceding embodiments, the recombinant genome comprises an inactivating mutation in a herpes simplex virus gene. In some embodiments, the herpes simplex virus gene is selected from the group consisting of Infected Cell Protein (ICP) 0, ICP4, ICP22, ICP27, ICP47, thymidine kinase (tk), Long Unique Region (UL) 41, and UL55. In some embodiments, the recombinant genome comprises an inactivation mutation in one or both copies of the ICP4 gene. In some embodiments, the recombinant genome comprises an inactivating mutation in the ICP22 gene. In some embodiments, the recombinant genome comprises an inactivating mutation in the UL41 gene. In some embodiments, the recombinant genome comprises an inactivating mutation in the ICP0 gene. In some embodiments, the recombinant genome comprises an inactivating mutation in the ICP27 gene. In some embodiments, the inactivating mutation is a deletion of the coding sequence of the gene(s). In some embodiments that may be combined with any of the preceding embodiments, the recombinant genome has reduced cytotoxicity when introduced into a target cell as compared to a wild-type herpes simplex virus genome. In some embodiments, the target cell is a human cell. In some embodiments, the target cell is a keratinocyte or fibroblast.

[0031] In some embodiments that may be combined with any of the preceding embodiments, the recombinant genome comprises the one or more polynucleotides within one or more viral gene loci. In some embodiments, the recombinant genome comprises the one or more polynucleotides within one or both of the ICP4 viral gene loci. In some embodiments, the recombinant genome comprises the one or more polynucleotides within the ICP22 viral gene locus. In some embodiments, the recombinant genome comprises the one or more polynucleotides within the UL41 viral gene locus.

[0032] Other aspects of the present disclosure relate to a herpes simplex virus (HSV) comprising any of the recombinant genomes described herein. In some embodiments, the HSV is replication competent. In some embodiments, the HSV is replication defective. In some embodiments that may be combined with any of the preceding embodiments, the HSV has reduced cytotoxicity as compared to a wild-type herpes simplex virus. In some embodiments that may be combined with any of the preceding embodiments, the HSV is a herpes simplex type 1 virus, a herpes simplex type 2 virus, or any derivatives thereof.

[0033] Other aspects of the present disclosure relate to a pharmaceutical composition comprising any of the recombinant genomes and/or viruses described herein and a pharmaceutically acceptable excipient. In some embodiments, the pharmaceutical composition is suitable for topical, transdermal, subcutaneous, intradermal, transmucosal, sublingual, nasal, buccal, intraorbital, intravitreal, subconjunctival, suprachoroidal, intraarticular, and/or inhaled administration. In some embodiments, the pharmaceutical composition is suitable for topical administration. In some embodiments that may be combined with any of the preceding embodiments, the pharmaceutical composition comprises a hydroxypropyl methylcellulose gel. In some embodiments that may be combined with any of the preceding embodiments, the pharmaceutical composition comprises a phosphate buffer. In some embodiments that may be combined with any of the preceding embodiments, the pharmaceutical composition comprises glycerol. In some embodiments that may be combined with any of the preceding embodiments, the pharmaceutical composition comprises a lipid carrier. In some embodiments that may be combined with any of the preceding embodiments, the pharmaceutical composition comprises a nanoparticle carrier.

[0034] Other aspects of the present disclosure relate to a method of administering an antibody to a subject comprising administering to the subject an effective amount of any of the viruses or pharmaceutical compositions described herein. In some embodiments, the virus or composition is administered topically, transdermally, subcutaneously, intradermally, transmucosally, sublingually, nasally, buccally, intravitreally, subconjunctivally, suprachoroidally, intraarticularly, or via inhalation. In some embodiments that may be combined with any of the preceding embodiments, the subject is a human. In some embodiments that may be combined with any of the preceding embodiments, the subject is not exposed to the antibody systemically.

[0035] Other aspects of the present disclosure relate to a method of providing prophylactic, palliative, and/or therapeutic relief of one or more signs or symptoms of a disease in a subject comprising administering to the subject and effective amount of any of the viruses or pharmaceutical compositions described herein. In some embodiments, the virus or composition is administered topically, transdermally, subcutaneously, intradermally, transmucosally, sublingually, nasally, buccally, intravitreally, subconjunctivally, suprachoroidally, intraarticularly, or via inhalation. In some embodiments that may be combined with any of the preceding embodiments, the disease is selected from the group consisting of psoriasis, atopic dermatitis, pyoderma gangrenosum, a blistering disease, pemphigus, pemphigus vulgaris, pemphigus foliaceus, an autoimmune bullous skin disorder, bullous pemphigoid, Behçet's disease, cancer, hidradenitis suppurativa, arthritis, rheumatoid arthritis, psoriatic arthritis, osteoarthritis, juvenile idiopathic arthritis, ankylosing spondylitis, axial spondylarthritis, reactive arthritis, enteropathic arthritis, autoimmune disease, melanoma, uveal melanoma, and thyroid eye disease. In some embodiments, the disease is not cancer. In some embodiments that may be combined with any of the preceding embodiments, the subject is a human. In some embodiments that may be combined with any of the preceding embodiments, the subject is not exposed to the antibody systemically.

[0036] Other aspects of the present disclosure relate to a method of administering an antibody to the epidermis and/or dermis of a subject comprising topically, transdermally, or intradermally administering to the subject an effective amount of any of the viruses or pharmaceutical compositions described herein. In some embodiments, the skin of the subject is abraded prior to administration. In some embodiments that may be combined with any of the preceding embodiments, the subject is a human. In some embodiments that may be combined with any of the preceding embodiments, the subject is not exposed to the antibody systemically.

[0037] Other aspects of the present disclosure relate to a method of administering an antibody to the mucosa of a subject comprising topically, transmucosally, sublingually, nasally, or buccally administering to the subject an effective amount of any of the viruses or pharmaceutical compositions described herein. In some embodiments, the subject is a human. In some embodiments that may be combined with any of the preceding embodiments, the subject is not exposed to the antibody systemically.

[0038] Other aspects of the present disclosure relate to a method of administering an antibody to one or more joints of a subject comprising intraarticularly administering to the subject an effective amount of any of the viruses or pharmaceutical compositions described herein. In some embodiments, the subject is a human. In some embodiments that may be combined with any of the preceding embodiments, the subject is not exposed to the antibody systemically.

[0039] Other aspects of the present disclosure relate to a method of administering an antibody to one or both eyes of a subject comprising topically, intraorbitally, intravitreally, subconjunctivally, or suprachoroidally administering to the subject an effective amount of any of the viruses or pharmaceutical compositions described herein. In some embodiments, the subject is a human. In some embodiments that may be combined with any of the preceding embodiments, the subject is not exposed to the antibody systemically.

### BRIEF DESCRIPTION OF THE DRAWINGS

[0040] The patent or application file contains at least one drawing executed in color. Copies of this patent or patent application publication with color drawings will be provided by the Office upon request and payment of the necessary fee.

[0041] FIGS. 1A-N show schematics of wild-type and modified herpes simplex virus genomes. FIG. 1A shows a wild-type herpes simplex virus genome. FIG. 1B shows a modified herpes simplex virus genome comprising deletions of the coding sequences of ICP4 (both copies) and ICP22, with a polynucleotide containing the coding sequence of a single-chain antibody (an scFv-Fc) operably linked to a heterologous promoter integrated at each of the ICP4 loci. FIG. 1C shows a modified herpes simplex virus genome comprising deletions of the coding sequence of ICP4 (both copies), with a polynucleotide containing the coding sequence of an scFv-Fc operably linked to a heterologous promoter integrated at each of the ICP4 loci. FIG. 1D shows a modified herpes simplex virus genome comprising deletions of the coding sequences of ICP4 (both copies) and ICP22, with a polynucleotide containing 1) the coding sequence of an antibody heavy chain operably linked to a first heterologous promoter, and 2) the coding sequence of an antibody light chain operably linked to a second heterologous promoter, integrated at each of the ICP4 loci. Both the antibody heavy and light chains are encoded on the same strand of DNA. FIG. 1E shows a modified herpes simplex virus genome comprising deletions of the coding sequence of ICP4 (both copies), with a polynucleotide containing 1) the coding sequence of an antibody heavy chain operably linked to a first heterologous promoter, and 2) the coding sequence of an antibody light chain operably linked to a second heterologous promoter, integrated at each of the ICP4 loci. Both the antibody heavy and light chains are encoded on the same strand of DNA. FIG. 1F shows a modified herpes simplex virus genome comprising deletions of the coding sequences of ICP4 (both copies) and ICP22, with a polynucleotide containing 1) the coding sequence of an antibody heavy chain operably linked to a first heterologous promoter, and 2) the coding sequence of an antibody light chain operably linked to a second heterologous promoter, integrated at each of the ICP4 loci. The antibody heavy and light chains are encoded on opposite strands of DNA. FIG. 1G shows a modified herpes simplex virus genome comprising deletions of the coding sequence of ICP4 (both copies), with a polynucleotide containing 1) the coding sequence of an antibody heavy chain operably linked to a first heterologous promoter, and 2) the coding sequence of an antibody light chain operably linked to a second heterologous promoter, integrated at each of the ICP4 loci. The antibody heavy and light chains are encoded on opposite strands of DNA. FIG. 1H shows a modified herpes simplex virus genome comprising deletions of the coding sequences of ICP4 (both copies) and ICP22, with a polynucleotide encoding a polycistronic mRNA operably linked to a heterologous promoter integrated at each of the ICP4 loci. The polycistronic mRNA contains the coding sequence of an antibody heavy chain and an antibody light chain separated by an internal ribosomal entry site (IRES). FIG. 1I shows a modified herpes simplex virus genome comprising deletions of the coding sequence of ICP4 (both copies), with a polynucleotide encoding a polycistronic mRNA operably linked to a heterologous promoter integrated at each of the ICP4 loci. The polycistronic mRNA contains the coding sequence of an antibody heavy chain and an antibody light chain separated by an internal ribosomal entry site (IRES). FIG. 1J shows a modified herpes simplex virus genome comprising deletions of the coding sequences of ICP4 (both copies), ICP22, and UL41, with a first polynucleotide containing the coding sequence of an antibody heavy chain operably linked to a heterologous promoter integrated at each of the ICP4 loci, and a second polynucleotide containing the coding sequence of an antibody light chain operably linked to a heterologous promoter integrated at the UL41 and ICP22 loci. FIG. 1K shows a modified herpes simplex virus genome comprising deletions of the coding sequences of ICP4 (both copies), ICP22, and UL41, with a first polynucleotide containing the coding sequence of an antibody light chain operably linked to a heterologous promoter integrated at each of the ICP4 loci, and a second polynucleotide containing the coding sequence of an antibody heavy chain operably linked to a heterologous promoter integrated at the UL41 and ICP22 loci. FIG. 1L shows a modified herpes simplex virus genome comprising deletions of the coding sequences of ICP4 (both copies) and UL41, with a first polynucleotide containing the coding sequence of an antibody heavy chain operably linked to a heterologous promoter integrated at each of the ICP4 loci, and a second polynucleotide containing the coding sequence of a polycistronic mRNA operably linked to a heterologous promoter integrated at the UL41 locus. The polycistronic mRNA contains two copies of the coding sequence of an antibody light chain separated by an internal ribosomal entry site (IRES). FIG. 1M shows a modified herpes simplex virus genome comprising deletions of the coding sequences of ICP4 (both copies) and ICP22, with a first polynucleotide containing the coding sequence of an antibody heavy chain operably linked to a heterologous promoter integrated at each of the ICP4 loci, and a second polynucleotide containing the coding sequence of a polycistronic mRNA operably linked to a heterologous promoter integrated at the ICP22 locus. The polycistronic mRNA contains two copies of the coding sequence of an antibody light chain separated by an internal ribosomal entry site (IRES). FIG. 1N shows a modified herpes simplex virus genome comprising deletions of the coding sequences of ICP4 (both copies), ICP22, and UL41, with a first polynucleotide containing the coding sequence of an antibody heavy chain operably linked to a heterologous promoter integrated at the ICP22 locus, and a second polynucleotide containing the coding sequence of an antibody light chain operably linked to a heterologous promoter integrated at the UL41 locus.

[0042] FIGS. 2A-B show the antibody concentration in cell supernatants harvested from mock infected (MOI-0) immortalized human keratinocytes (HaCaTs), or HaCaTs infected at the indicated multiplicities of infection (MOI) with engineered HSV vectors encoding the indicated antibodies, as assessed by ELISA. FIG. 2A shows the antibody concentration in cell supernatants harvested from HaCaT cells infected with HSV encoding a human (Ab1Fc1 or Ab1Fc2) or chimeric (Ab2Fc2) single-chain antibody. FIG. 2B shows the antibody concentration in cell supernatants harvested from HaCaT cells infected with HSV encoding a mouse (Ab66Fc1 or Ab66Fc2) single-chain antibody. For each condition, data is presented for two replicates ±SEM.

[0043] FIG. 3 shows the detectable levels of recombinant human TNFα spiked into cell supernatants harvested from mock infected (MOI 0) immortalized human keratinocytes (HaCaTs), or HaCaTs infected at the indicated multiplicities of infection (MOI) with an engineered HSV vector encoding an anti-TNFα human single-chain antibody (Ab1Fc1), as assessed by ELISA. For each condition, data is presented for two replicates ±SEM.

[0044] FIGS. 4A-B show the relative fold change vs. ethanol (EtOH) control in transcript levels of certain markers of atopic dermatitis-like lesions in mouse ear and dorsal skin treated topically for five days with the vitamin D3 synthetic analog calcipotriol (MC903), as assessed by qRT-PCR analysis. FIG. 4A shows the relative fold change in TSLP transcripts vs. EtOH control in mouse ear and dorsal skin treated topically with MC903 on Days 1-5, with tissues being harvested on Day 5 or Day 7. FIG. 4B shows the relative fold change in IL-4 transcripts vs. EtOH control in mouse ear and dorsal skin treated topically with MC903 on Days 1-5, with tissues being harvested on Day 5, Day 7, or Day 9.

[0045] FIG. 5 show the histology of representative mouse ear skin treated with MC903 or EtOH control, as assessed by hematoxylin and eosin (H&E) staining.

[0046] FIGS. 6A-B show representative immunofluorescence images of human single-chain antibody (Ab1Fc1) expression in ear and dorsal skin biopsies harvested from MC903-exposed C57BL/6J mice treated topically with either HSV-Ab1Fc1 or a negative control (vehicle). DAPI staining was used to visualize nuclei. FIG. 6A shows Ab1Fc1 expression in mouse ear and dorsal skin treated with MC903 on Days 1-5 and topical HSV-Ab1Fc1 (or vehicle control) on Day 5, with tissues being harvested on Day 7. FIG. 6B shows Ab1Fc1 expression in mouse ear and dorsal skin treated with MC903 on Days 1-5 and topical HSV-Ab1Fc1 (or vehicle control) on Day 7, with tissues being harvested on Day 9.

[0047] FIGS. 7A-C show mouse anti-mouse IL-4Ra antibody (Ab66Fc1) nucleic acid analyses of ear and dorsal skin in an MC903-induced atopic dermatitis model after HSV-Ab66Fc1 infection. FIG. 7A shows the levels of Ab66Fc1 DNA present in ear tissue biopsies harvested from MC903- or ethanol (EtOH) treated-animals after repeated topical application of HSV-Ab66Fc1 or vehicle control, as determined by qPCR analysis. FIG. 7B shows the levels of Ab66Fc1 DNA present in dorsal skin tissue biopsies harvested from MC903- or ethanol (EtOH) treated-animals after repeated topical application of HSV-Ab66Fc1 or vehicle control, as determined by qPCR analysis. FIG. 7C shows the levels of Ab66Fc1 transcripts present in ear tissue biopsies harvested from MC903- or ethanol (EtOH) treated-animals after repeated topical application of HSV-Ab66Fc1 or vehicle control, as determined by qRT-PCR analysis. For each condition in the qPCR and qRT-PCR analysis, data is presented for two replicates ±SEM.

[0048] FIGS. 8A-B show the effect of HSV-Ab66Fc1 or vehicle control on the development of certain ear phenotypes in an MC903-induced atopic dermatitis model. FIG. 8A shows average ear thickness on Days 1-10 of MC903- or ethanol treated-animals after repeated topical application of HSV-Ab66Fc1 or vehicle control. Asterisks indicate statistically significant differences between the MC903/Veh and MC903/Ab66 groups at each timepoint. FIG. 8B shows average ear weight on Day 10 of MC903- or ethanol treated-animals after repeated topical application of HSV-Ab66Fc1 or vehicle control. For each timepoint, data is presented for the average of four ears ±SEM. Statistics were calculated using an unpaired student's t-test: *p<0.05; **p<0.01; ***p<0.005.

### DETAILED DESCRIPTION

[0049] The following description sets forth exemplary methods, parameters, and the like. It should be recognized, however, that such a description is not intended as a limitation on the scope of the present disclosure but is instead provided as a description of exemplary embodiments.

### I. General Techniques

[0050] The techniques and procedures described or referenced herein are generally well understood and commonly employed using conventional methodology by those skilled in the art, such as, for example, the widely utilized methodologies described in Sambrook et al., Molecular Cloning: A Laboratory Manual 3d edition (2001) Cold Spring Harbor Laboratory Press, Cold Spring Harbor, N.Y.; Current Protocols in Molecular Biology (F. M. Ausubel, et al. eds., (2003)); the series Methods in Enzymology (Academic Press, Inc.): PCR 2: A Practical Approach (M. J. MacPherson, B. D. Hames and G. R. Taylor eds. (1995)), Harlow and Lane, eds. (1988); Oligonucleotide Synthesis (M. J. Gait, ed., 1984); Methods in Molecular Biology, Humana Press; Cell Biology: A Laboratory Notebook (J. E. Cellis, ed., 1998) Academic Press; Animal Cell Culture (R. I. Freshney), ed., 1987); Introduction to Cell and Tissue Culture (J. P. Mather and P. E. Roberts, 1998) Plenum Press; Cell and Tissue Culture: Laboratory Procedures (A. Doyle, J. B. Griffiths, and D. G. Newell, eds., 1993-8) J. Wiley and Sons; Gene Transfer Vectors for Mammalian Cells (J. M. Miller and M. P. Calos, eds., 1987); PCR: The Polymerase Chain Reaction, (Mullis et al., eds., 1994); Short Protocols in Molecular Biology (Wiley and Sons, 1999).

### II. Definitions

[0051] Before describing the present disclosure in detail, it is to be understood that the present disclosure is not limited to particular compositions or biological systems, which can, of course, vary. It is also to be understood that the terminology used herein is for the purpose of describing particular embodiments only and is not intended to be limiting.

[0052] As used herein, the singular forms “a”, “an” and “the” include plural referents unless the content clearly dictates otherwise. Thus, for example, reference to “a molecule” optionally includes a combination of two or more such molecules, and the like.

[0053] As used herein, the term “and/or” may include any and all combinations of one or more of the associated listed items. For example, the term “a and/or b” may refer to “a alone”, “b alone”, “a or b”, or “a and b”; the term “a, b, and/or c” may refer to “a alone”, “b alone”, “c alone”, “a or b”, “a or c”, “b or c”, “a, b, or c”, “a and b”, “a and c” “b and c”, or “a, b, and c”; etc.

[0054] As used herein, the term “about” refers to the usual error range for the respective value readily known to the skilled person in this technical field. Reference to “about” a value or parameter herein includes (and describes) embodiments that are directed to that value or parameter per se.

[0055] It is understood that aspects and embodiments of the present disclosure include “comprising”, “consisting”, and “consisting essentially of” aspects and embodiments.

[0056] As used herein, the terms “polynucleotide”, “nucleic acid sequence”, “nucleic acid”, and variations thereof shall be generic to polydeoxyribonucleotides (containing 2-deoxy-D-ribose), to polyribonucleotides (containing D-ribose), to any other type of polynucleotide that is an N-glycoside of a purine or pyrimidine base, and to other polymers containing non-nucleotidic backbones, provided that the polymers contain nucleobases in a configuration that allows for base pairing and base stacking, as found in DNA and RNA. Thus, these terms include known types of nucleic acid sequence modifications, for example, substitution of one or more of the naturally occurring nucleotides with an analog, and inter-nucleotide modifications.

[0057] As used herein, a nucleic acid is “operatively linked” or “operably linked” when it is placed into a functional relationship with another nucleic acid sequence. For example, a promoter or enhancer is operably linked to a coding sequence if it affects the transcription of the sequence; or a ribosome binding site is operably linked to a coding sequence if it is positioned so as to facilitate translation. Generally, “operatively linked” or “operably linked” means that the DNA or RNA sequences being linked are contiguous.

[0058] As used herein, the term “vector” refers to discrete elements that are used to introduce heterologous nucleic acids into cells for either expression or replication thereof. An expression vector includes vectors capable of expressing nucleic acids that are operatively linked with regulatory sequences, such as promoter regions, that are capable of effecting expression of such nucleic acids. Thus, an expression vector may refer to a DNA or RNA construct, such as a plasmid, a phage, recombinant virus or other vector that, upon introduction into an appropriate host cell, results in expression of the nucleic acids. Appropriate expression vectors are well known to those of skill in the art and include those that are replicable in eukaryotic cells and those that remain episomal or those which integrate into the host cell genome.

[0059] As used herein, an “open reading frame” or “ORF” refers to a continuous stretch of nucleic acids, either DNA or RNA, that encode a protein or polypeptide. Typically, the nucleic acids comprise a translation start signal or initiation codon, such as ATG or AUG, and a termination codon.

[0060] As used herein, an “untranslated region” or “UTR” refers to untranslated nucleic acids at the 5′ and/or 3′ ends of an open reading frame. The inclusion of one or more UTRs in a polynucleotide may affect post-transcriptional regulation, mRNA stability, and/or translation of the polynucleotide.

[0061] As used herein, the term “transgene” refers to a polynucleotide that is capable of being transcribed into RNA and translated and/or expressed under appropriate conditions, after being introduced into a cell. In some aspects, it confers a desired property to a cell into which it was introduced, or otherwise leads to a desired therapeutic or diagnostic outcome.

[0062] As used herein, the terms “polypeptide,” “protein,” and “peptide” are used interchangeably and may refer to a polymer of two or more amino acids.

[0063] As used herein, the term “antibody” is used in the broadest sense, and encompasses various antibody structures, including, for example monoclonal antibodies, polyclonal antibodies, multispecific antibodies (e.g., bispecific antibodies, trispecific antibodies, etc.), and antibody fragments so long as they exhibit the desired biological activity. The term “antibody” also encompasses hybrid antibodies, altered antibodies, chimeric antibodies, and humanized antibodies. The term antibody includes: hybrid (chimeric) antibody molecules (see, for example, Winter et al. (1991) Nature 349:293-299; and U.S. Pat. No. 4,816,567); F(ab′)₂ and F(ab) fragments; Fᵥ molecules (noncovalent heterodimers, see, for example, Inbar et al. (1972) Proc Natl Acad Sci USA 69:2659-2662; and Ehrlich et al. (1980) Biochem 19:4091-4096); single-chain Fv molecules (scFv) (see, e.g., Huston et al. (1988) Proc Natl Acad Sci USA 85:5879-5883); nanobodies or single-domain antibodies (sdAb) (see, e.g., Wang et al. (2016) Int J Nanomedicine 11:3287-3303, Vincke et al. (2012) Methods Mol Biol 911:15-26; dimeric and trimeric antibody fragment constructs; minibodies (see, e.g., Pack et al. (1992) Biochem 31:1579-1584; Cumber et al. (1992) J Immunology 149B:120-126); humanized antibody molecules (see, e.g., Riechmann et al. (1988) Nature 332:323-327; Verhoeyan et al. (1988) Science 239:1534-1536; and U.K. Patent Publication No. GB 2,276,169, published 21 Sep. 1994); and, any functional fragments obtained from such molecules, wherein such fragments retain specific-binding properties of the parent antibody molecule.

[0064] The basic 4-chain antibody unit is a heterotetrameric glycoprotein composed of two identical light chains and two identical heavy chains. The pairing of a variable heavy (V_{H}) region and variable light (V_{L}) region together forms a single antigen-binding site. For the structure and properties of the different classes of antibodies, see e.g., Basic and Clinical Immunology, 8^{th} Ed., Daniel P. Stites, Abba I Ten, and Tristram G. Parslow (eds.), Appleton & Lange, Norwalk, Conn., 1994, page 71 and Chapter 6.

[0065] The light chain from any vertebrate species can be assigned to one of two clearly distinct types, called kappa (“κ”) (see e.g., SEQ ID NO: 601 for an exemplary human kappa constant domain sequence) and lambda (“λ”) (see e.g., SEQ ID NO: 602 for an exemplary human lambda constant domain sequence), based on the amino acid sequences of their constant domains. Depending on the amino acid sequence of the constant domain of their heavy chains (CH), immunoglobulins can be assigned to different classes or isotypes. There are five classes of immunoglobulins: IgA, IgD, IgE, IgG, and IgM, having heavy chains designated alpha (“α”), delta (“δ”), epsilon (“ε”), gamma (“γ”), and mu (“μ”), respectively. The γ and α classes are further divided into subclasses (isotypes) on the basis of relatively minor differences in the CH sequence and function, e.g., humans expressing the following subclasses: IgG1, IgG2, IgG3, IgG4, IgA1, and IgA2. The subunit structures and three-dimensional configurations of different classes of immunoglobulins are well known, and are described generally in, e.g., Abbas et al., Cellular and Molecular Immunology, 4^{th} ed. (W.B. Saunders Co., 2000).

[0066] As used herein, the terms “variable region” or “variable domain” of an antibody refer to the amino-terminal domains of the heavy or light chain of the antibody. These domains are generally the most variable parts of the antibody (relative to other antibodies of the same class) and contain the antigen binding sites.

[0067] As used herein, the term “variable” refers to the fact that certain segments of the variable domains differ extensively in sequence among antibodies. The variable domain mediates antigen binding and defines the specificity of a particular antibody for its particular antigen. However, the variability is not evenly distributed across the entire span of the variable domains. Instead, it is concentrated in three segments called hypervariable regions (HVRs) both in the light chain and the heavy chain variable domains. The more highly conserved portions of variable domains are called the framework regions (FR).

[0068] As used herein, the terms “hypervariable region” or “HVR” refer to the regions of an antibody variable domain that are hypervariable in sequence and/or form structurally defined loops. Generally, antibodies comprise six HVRs; three in the VH (HVR-H1, HVR-H2, and HVR-H3), and three in the VL (HVR-L1, HVR-L2, and HVR-L3). In native antibodies, HVR-H3 and HVR-L3 display the most diversity of the six HVRs, and HVR-H3 in particular is believed to play a unique role in conferring fine specificity to antibodies (see e.g., Xu et al. Immunity 13: 37-45 (2000); and Johnson and Wu, Methods in Molecular Biology 248: 1-25 (Lo, ed., Human Press, Totowa N.J., 2003)). Indeed, naturally occurring camelid antibodies consisting of a heavy chain only are functional and stable in the absence of light chain (see e.g., Hamers-Casterman et al. Nature 363: 446-448 (1993); and Sheriff et al. Nature Struct. Biol. 3: 733-736 (1996)).

[0069] A number of HVR delineations are in use and are encompassed herein. The HVRs that are EU or Kabat complementarity-determining regions (CDRs) are based on sequence variability and are the most commonly used. Chothia refers instead to the location of the structure loops (Chothia and Lesk, J. Mol. Biol. 196: 901-917 (1987)). The AbM HVRs represent a compromise between the EU or Kabat CDRs and Chothia structural loops and are used by Oxford Molecular's AbM antibody modeling software. The “contact” HVRs are based on an analysis of the available complex crystal structures.

[0070] HVRs may comprise “extended HVRs” as follows: 24-36 or 24-24 (HVR-L1), 46-56 or 50-46 (HVR-L2), and 89-97 or 89-96 (HVR-L3) in the VL, and 26-35 (HVR-H1), 50-65 or 49-65 (HVR-H2), and 93-201, 94-102, or 95-102 (HVR-H3) in the VH. The variable domain residues are numbered according to EU or Kabat et al. for each of these extended HVR definitions.

[0071] As used herein, the terms “Framework” or “FR” refer to variable domain residues other than hypervariable region (HVR) residues. The FR of a variable domain generally consists of four FR domains: FR1, FR2, FR3, and FR4. Accordingly, the HVR and FR sequences of a variable domain generally appear in the following sequence in VH (or VL): FR1-HVR-H1 (L1)-FR2-HVR-H2 (L2)-FR3-HVR-H3 (L3)-1-R4.

[0072] As used herein, the terms “full-length antibody”, “intact antibody”, or “whole antibody” are used interchangeably to refer to an antibody having a structure substantially similar to a native antibody structure or having heavy chains that contain an Fc region as defined herein. The constant domains may be native sequence constant domains (e.g., human native sequence constant domains) or amino acid sequence variants thereof. In some embodiments, the intact antibody has one or more effector functions.

[0073] As used herein, the term “Fc region” is used to define a C-terminal region of an immunoglobulin heavy chain, including the native sequence Fc regions and variant Fc regions. Although the boundaries of the Fc region of an immunoglobulin heavy chain might vary, the human IgG heavy chain Fc region is usually defined to stretch from an amino acid residue at position Cys226, or from Pro230, to the carboxyl-terminus thereof. The C-terminal lysine (residue 447 according to the EU or Kabat numbering system) of the Fc region may be removed, for example, during production of the antibody, or by recombinantly engineering the nucleic acid encoding a heavy chain of the antibody. Accordingly, a composition of intact antibodies may comprise antibody populations with all K447 residues removed, antibody populations with no K447 residues removed, and antibody populations having a mixture of antibodies with and without the K447 residue.

[0074] Antibody “effector functions” refer to those biological activities attributable to the Fc region (a native sequence Fc region or amino acid sequence variant Fc region) of an antibody and vary with the antibody isotype.

[0075] As used herein, the term “native antibodies” refers to antibodies that are usually heterotetrameric glycoproteins of about 150,000 Daltons, composed of two identical light chains and two identical heavy chains. Each light chain is linked to a heavy chain by one covalent disulfide bond, while the number of disulfide linkages varies among the heavy chains of different immunoglobulin isotypes. Each heavy and light chain also has regularly spaced interchain disulfide bridges. Each heavy chain has at one end a variable domain (VH) followed by a number of constant domains. Each light chain has a variable domain at one end (VL) and a constant domain at its other end; the constant domain of the light chain is aligned with the first constant domain of the heavy chain, and the light chain variable domain is aligned with the variable domain of the heavy chain. Particular amino acid residues are believed to form an interface between the light chain and heavy chain variable domains.

[0076] As used herein, the term “monoclonal antibody” refers to an antibody obtained from a population of substantially homogenous antibodies, i.e., the individual antibodies comprising the population are identical except for possible naturally occurring mutations and/or post-translational modifications (e.g., isomerizations, amidations) that may be present in minor amounts. Monoclonal antibodies are highly specific, being directed against one or more antigenic sites. In some embodiments, a monoclonal antibody of the present disclosure can be multispecific (e.g., a bispecific antibody, a trispecific antibody). In contrast to polyclonal antibody preparations which typically include different antibodies directed against different determinants (epitopes), each monoclonal antibody is directed against a single determinant on the one or more antigenic sites. The modifier “monoclonal” indicates the character of the antibody as being obtained from a substantially homogenous population of antibodies and is not to be construed as requiring production of the antibody by and particular method.

[0077] As used herein, a “chimeric” antibody refers to an antibody in which a portion of the heavy and/or light chain is derived from a particular source or species, while the remainder of the heavy and/or light chain is derived from a different source or species, as well as fragments of such antibodies, so long as they exhibit the desired biological activity. As used herein, a “humanized” antibody is used as a subset of “chimeric” antibody.

[0078] As used herein, a “humanized” antibody refers to a chimeric antibody comprising amino acid residues from non-human HVRs and amino acid residues from human FRs. In some embodiments, a humanized antibody will comprise substantially all of at least one, and typically two, variable domains, in which all or substantially all of the HVRs correspond to those of a non-human antibody, and all or substantially all of the FRs correspond to those of a human antibody. A humanized antibody optionally may comprise at least a portion of an antibody constant region derived from a human antibody. A “humanized form” of an antibody, e.g., a non-human antibody, refers to an antibody that has undergone humanization. For further details, see e.g., Jones et al. Nature 321: 522-525 (1986); Riechmann et al. Nature 332: 323-329 (1988); Presta, Curr. Op. Stuct. Biol. 2: 593-596 (1992); Vaswani and Hamilton, Ann. Allergy, Asthma & Immunol 1: 105-115 (1998); Harris Biochem. Soc. Transactions 23: 1035-1038 (1995); Hurle and Gross, Curr. Op. Biotech. 5: 428-433 (1994); U.S. Pat. Nos. 6,982,321; and 7,087,409.

[0079] As used herein, a “human” antibody refers to an antibody which possesses an amino acid sequence which corresponds to that of an antibody produced by a human or a human cell or derived from a non-human source that utilizes human antibody repertoires or other human antibody-encoding sequences. This definition specifically excludes a humanized antibody comprising non-human antigen-binding residues.

[0080] As used herein, a “human consensus framework” refers to a framework which represents the most commonly occurring amino acid residues in a selection of human immunoglobulin VL or VH framework sequences. Generally, the selection of human immunoglobulin VL or VH sequences is from a subgroup of variable domain sequences. Generally, the subgroup of sequences is a subgroup as in Kabat at al. (1991) Sequences of Proteins of Immunological Interest, Fifth Edition, NIH Publication 91-3242, Bethesda Md., vols. 1-3.

[0081] As used herein, the term “antibody fragment” refers to a molecule other than an intact antibody that comprises a portion of an intact antibody, preferably the antigen binding and/or the variable region of the intact antibody. Examples of antibody fragments may include, without limitation, Fv, Fab, Fab′, Fab′-SH, F(ab′)2, scFv, SMIP, domain antibodies, di-scFv, scFv-Fc, Nanobodies® (e.g., monovalent nanobodies, bivalent nanobodies, etc.), minibodies, diabodies, triabodies, linear antibodies, single-chain antibody molecules, and multispecific antibodies formed from antibody fragments.

[0082] Papain digestion of antibodies produces two identical antigen-binding fragments, called Fab fragments, and a residual Fc fragment (a designation reflecting the ability to crystallize readily). The Fab fragment consists of an entire light chain, along with the variable region of the heavy chain and the first constant domain (C_{H}1) of one heavy chain. Each Fab fragment is monovalent with respect to antigen binding, i.e., it has a single antigen-binding site. The Fc fragment comprises the carboxy-terminal portions of both heavy chains held together by disulfide bonds. The effector functions of antibodies are determined by sequence in the Fc region, the region which is also recognized by Fc receptors (FcR) found on certain types of cells.

[0083] Pepsin treatment of an antibody yields a single large F(ab′)2 fragment which roughly corresponds to two disulfide linked Fab fragments having different antigen-binding activity and is still capable of cross-linking antigen. Fab′ fragments differ from Fab fragments by having a few additional residues at the carboxy terminus of the C_{H}1 domain including one or more cysteines from the antibody hinge region. Fab′-SH is the designation for Fab′ in which the cysteine residue(s) of the constant domains bear a free thiol group. F(ab′)2 antibody fragments originally were produced as pairs of Fab′ fragments which have hinge cysteines between them. Other chemical couplings of antibody fragments are also known.

[0084] The “Fv” is the minimum antibody fragment which contains a complete antigen-recognition and binding site. This fragment consists of a dimer of one heavy and one light chain variable region domain in tight, non-covalent association. From the folding of these two domains emanate six hypervariable loops (3 loops each from the heavy and light chain) that contribute the amino acid residues for antigen binding and confer antigen binding specificity to the antibody. However, even a single variable domain (or half of an Fv comprising only three HVRs specific for an antigen) has the ability to recognize and bind antigen, although at a lower affinity than the entire binding site.

[0085] “Single-chain Fv”, also abbreviated as “sFv” or “scFv”, are antibody fragments that comprise the VH and VL antibody domains connected into a single polypeptide chain. Preferably, the scFv polypeptide further comprises a polypeptide linker between the VH and VL domains which enables the scFv to form the desired structure for antigen binding. For a review of the scFv, see e.g., Pluckthun in The Pharmacology of Monoclonal Antibodies, vol. 113, Rosenburg and Moore (eds.), Springer-Verlag, New York, pp. 269-315 (1994), U.S. Pat. No. 6,248,516.

[0086] A “nanobody” refers to a single-domain antibody (sdAb) which is able to bind selectively to an antigen. A nanobody may comprise heavy chain variable domains and no light chain variable domains, or vice versa. A nanobody may be derived from camelids (V_{H}H antibodies) or cartilaginous fishes (V_{NAR} antibodies). Alternatively, a nanobody may be derived from splitting the dimeric variable domains from an antibody, for example, an IgG antibody, into monomers.

[0087] Diabodies are antibody fragments with two antigen-binding sites that may be bivalent or bispecific. The term “diabodies” refers to small antibody fragments prepared by constructing scFv fragments with short linkers (about 5-10 residues) between the VH and VL domains such that inter-chain but not intra-chain pairing of the V domains is achieved, thereby resulting in a bivalent fragment, i.e., a fragment having two antigen-binding sites. Bispecific diabodies are heterodimers of two “crossover” scFv fragments in which the VH and VL domains of the two antibodies are present on different polypeptide chains. Diabodies are described in greater detail in, for example, EP404097, WO93/11161, Hudson et al. (2003) Nat. Med. 9:129-134, and Hoolinger et al. PNAS USA 90: 6444-48 (1993). Triabodies and tetrabodies are also described in Hudson et al. (2003) Nat. Med. 9:129-134.

[0088] As used herein, the terms “specifically recognizes” or “specifically binds” refer to measurable and reproducible interactions, such as attraction or binding between a target and an antibody, that is determinative of the presence of the target in the presence of a heterogenous population of molecules including biological molecules. For example, an antibody that specifically or preferentially binds to a target or an epitope is an antibody that binds this target or epitope with greater affinity, avidity, more readily, and/or with greater duration than it binds to other targets or other epitopes of the target. It is also understood that, for example, an antibody (or moiety) that specifically or preferentially binds to a first target may or may not specifically or preferentially bind to a second target. As such, “specific binding” or “preferential binding” does not necessarily require (although it can include) exclusive binding.

[0089] An “agonist” antibody or an “activating” antibody is an antibody that induces (e.g., increases) one or more activities or functions of the antigen after the antibody binds the antigen and/or that induces (e.g., increases) antigen binding to one or more ligands after the antibody binds the antigen.

[0090] A “blocking” antibody, an “antagonist” antibody, or an “inhibitory” antibody is an antibody that inhibits or reduces (e.g., decreases) antigen binding to one or more ligands after the antibody binds the antigen and/or that inhibits or reduces (e.g., decreases) one or more activities or functions of the antigen after the antibody binds the antigen. In some embodiments, blocking antibodies, antagonist antibodies, or inhibitory antibodies substantially or completely inhibits antigen binding to one or more ligands and/or substantially or completely inhibits one or more activities or functions of the antigen.

[0091] As used herein, a “subject”, “host”, or an “individual” refers to any animal classified as a mammal, including humans, domestic and farm animals, and zoo, sports, or pet animals, such as dogs, horses, cats, cows, as well as animals used in research, such as mice, rats, hamsters, rabbits, and non-human primates, etc. In some embodiments, the mammal is human.

[0092] As used herein, the terms “pharmaceutical formulation” or “pharmaceutical composition” refer to a preparation which is in such a form as to permit the biological activity of the active ingredient(s) to be effective, and which contains no additional components which are unacceptably toxic to a subject to which the composition or formulation would be administered. “Pharmaceutically acceptable” excipients (e.g., vehicles, additives) are those which can reasonably be administered to a subject to provide an effective dose of the active ingredient(s) employed.

[0093] As used herein, “cutaneous administration” or “cutaneously administering” refers to the delivery of a composition to a subject by contacting, directly or otherwise, a formulation comprising the composition to all (“systemic”) or a portion (“topical”) of the skin of a subject. The term encompasses several routes of administration including, but not limited to, topical and transdermal. Topical administration may be used as a means to deliver a composition to the epidermis or dermis of a subject, or to specific strata thereof.

[0094] As used herein, an “effective amount” is at least the minimum amount required to affect a measurable improvement or prevention of one or more symptoms of a particular disorder. An “effective amount” may vary according to factors such as the disease state, age, sex, and weight of the patient. An effective amount is also one in which any toxic or detrimental effects of the treatment are outweighed by the therapeutically beneficial effects. For prophylactic use, beneficial or desired results include results such as eliminating or reducing the risk, lessening the severity, or delaying the onset of the disease, its complications and intermediate pathological phenotypes presenting during development of the disease. For therapeutic use, beneficial or desired results include clinical results such as decreasing one or more symptoms resulting from the disease, increasing the quality of life of those suffering from the disease, decreasing the dose of other medications used to treat symptoms of the disease, delaying the progression of the disease, and/or prolonging survival. An effective amount can be administered in one or more administrations. For purposes of the present disclosure, an effective amount of a recombinant nucleic acid, virus, and/or pharmaceutical composition is an amount sufficient to accomplish prophylactic or therapeutic treatment either directly or indirectly. As is understood in the clinical context, an effective amount of a recombinant nucleic acid, virus, and/or pharmaceutical composition may or may not be achieved in conjunction with another drug, compound, or pharmaceutical composition. Thus, an “effective amount” may be considered in the context of administering one or more therapeutic agents, and a single agent may be considered to be given in an effective amount if, in conjunction with one or more other agents, a desirable result may be or is achieved.

[0095] As used herein, “treatment” refers to clinical intervention designed to alter the natural course of the individual or cell being treated during the course of clinical pathology. Desirable effects of treatment include decreasing the rate of disease/disorder/defect progression, ameliorating or palliating the disease/disorder/defect state, and remission or improved prognosis.

[0096] As used herein, the term “delaying progression of” a disease/disorder/defect refers to deferring, hindering, slowing, retarding, stabilizing, and/or postponing development of the disease/disorder/defect. This delay can be of varying lengths or time, depending on the history of the disease/disorder/defect and/or the individual being treated. As is evident to one of ordinary skill in the art, a sufficient or significant delay can, in effect, encompass prevention, in that the individual does not develop the disease.

### III. Recombinant Nucleic Acids

[0097] Certain aspects of the present disclosure relate to recombinant nucleic acids (e.g., isolated recombinant nucleic acids) comprising one or more (e.g., one or more, two or more, three or more, four or more, five or more, ten or more, etc.) polynucleotides encoding an antibody. The antibody may be any antibody (in any form) described herein or known in the art. In some embodiments, the antibody is a full-length antibody. In some embodiments, the antibody is an antibody fragment. In some embodiments, the antibody is an agonist antibody. In some embodiments, the antibody is an antagonist antibody.

[0098] In some embodiments, the recombinant nucleic acid is a vector. In some embodiments, the recombinant nucleic acid is a viral vector. In some embodiments, the recombinant nucleic acid is a herpes viral vector. In some embodiments, the recombinant nucleic acid is a herpes simplex virus amplicon. In some embodiments, the recombinant nucleic acid is a recombinant herpes virus genome. In some embodiments, the recombinant nucleic acid is a recombinant herpes simplex virus genome. In some embodiments, the recombinant herpes simplex virus genome is a recombinant type 1 herpes simplex virus (HSV-1) genome.

[0099] Polynucleotides Encoding Antibodies

[0100] In some embodiments, the present disclosure relates to a recombinant nucleic acid (e.g., a recombinant herpes virus genome) comprising one or more (e.g., one or more, two or more, three or more, four or more, five or more, ten or more, etc.) polynucleotides encoding an antibody. In some embodiments, at least one of the polynucleotides encodes a single-chain antibody (e.g., an scFv, an scFv-Fc, etc.). In some embodiments, at least one of the polynucleotides comprises multiple expression cassettes encoding the antibody (e.g., a first expression cassette encoding an antibody heavy chain and a second expression cassette encoding an antibody light chain, etc.). In some embodiments, at least one of the polynucleotides encodes a polycistronic mRNA encoding the antibody (e.g., a polycistronic mRNA comprising an ORF encoding an antibody heavy chain and an ORF encoding an antibody light chain separated by an IRES, etc.). In some embodiments, at least one of the polynucleotides encodes a chimeric polypeptide (e.g., a polypeptide comprising an antibody heavy chain and an antibody light chain separated by a cleavable linker, etc.). In some embodiments, the recombinant genome comprises one polynucleotide encoding an antibody. In some embodiments, the recombinant genome comprises two or more polynucleotides encoding an antibody (e.g., a first polynucleotide encoding an antibody heavy chain and a second polynucleotide encoding an antibody light chain, etc.).

[0101] In some embodiments, a first recombinant nucleic acid of the present disclosure comprises one or more polynucleotides encoding a portion of an antibody (e.g., an antibody heavy chain), and is used in conjunction with a second recombinant nucleic acid comprising one or more polynucleotides encoding a complementary portion of an antibody (e.g., an antibody light chain). In some embodiments, the first and second recombinant nucleic acids are in a single composition (e.g., contained in separate herpes simplex viruses formulated as a single pharmaceutical composition). In some embodiments, the first and second recombinant nucleic acids are in different compositions (e.g., contained in separate herpes simplex viruses formulated as two distinct pharmaceutical compositions). In some embodiments, the first recombinant nucleic acid is delivered into a target cell prior to, in conjunction with, or after delivery of the second recombinant nucleic acid into the target cell (e.g., in order to produce a single full-length antibody in one or more cells of the subject).

[0102] In some embodiments a recombinant nucleic acid of the present disclosure comprises polynucleotides encoding two or more (e.g., two or more, three or more, four or more, five or more, six or more, seven or more, eight or more, nine or more, ten or more, etc.) antibodies. In some embodiments, the two or more antibodies are the same. In some embodiments, the two or more antibodies are different.

[0103] Antibodies

[0104] Antibodies encoded by one or more of the polynucleotides of the present disclosure may be from any suitable species known in the art, including, for example, human antibodies, mouse antibodies, rat antibodies, rabbit antibodies, camelid antibodies, chicken antibodies, donkey antibodies, feline antibodies, goat antibodies, sheep antibodies, horse antibodies, hamster antibodies, guinea pig antibodies, shark antibodies, and any chimeric antibodies thereof. In some embodiments, the antibody is a human antibody. In some embodiments, the antibody is a mouse antibody. In some embodiments the antibody is a chimeric antibody (e.g., a human-mouse chimeric antibody). In some embodiments, the antibody is a humanized antibody.

[0105] Antibodies encoded by one or more of the polynucleotides of the present disclosure may be of any suitable isotype known in the art, including, for example, IgA, IgD, IgE, IgG, IgM, and any combinations thereof. In some embodiments, the antibody is an IgG antibody. In some embodiments, the IgG antibody is an IgG1 antibody (see e.g., SEQ ID NOS: 596 or 597 for exemplary human IgG1 constant region sequences), an IgG2 antibody (see e.g., SEQ ID NO: 598 for an exemplary human IgG2 constant region sequence), an IgG3 antibody (see e.g., SEQ ID NO: 599 for an exemplary IgG3 constant region sequence), an IgG4 antibody (see e.g., SEQ ID NO: 600 for an exemplary human IgG4 constant region sequence), and any chimeric IgG antibodies thereof. In some embodiments, the IgG antibody is an IgG1 antibody.

[0106] In some embodiments, an antibody encoded by one or more polynucleotides of the present disclosure is an antibody fragment. Any type or form of antibody fragment known in the art may be encoded by a polynucleotide of the present disclosure including, for example, a Fab fragment, a Fab′ fragment, a Fab′-SH fragment, a F(ab′)2 fragment, an Fv fragment, an scFv fragment, an scFv-Fc fragment, as well as any other type or form of antibody fragment described herein or known in the art. In some embodiment, the antibody fragment is a Fab fragment. In some embodiments, the antibody fragment is an scFv. In some embodiments, the antibody fragment is an scFv-Fc. For a review of certain antibody fragments, see e.g., Hudson et al. (2003) Nat. Med. 9:129-134, Pluckthün The Pharmacology of Monoclonal Antibodies vol. 113, Rosenburg and Moore eds. (Springer-Verlag, New York) pp. 269-315 (1994), WO93/16185, U.S. Pat. Nos. 5,571,894, 5,587,458, and 5,869,046.

[0107] In some embodiments, an antibody encoded by one or more polynucleotides of the present disclosure is a chimeric antibody. Certain chimeric antibodies are described, e.g., in U.S. Pat. No. 4,816,567, and Morrison et al. (1984) PNAS USA 81:6851-6855. In some embodiments, a chimeric antibody comprises a non-human variable region (e.g., a variable region derived from a mouse, rat, hamster, rabbit, non-human primate, etc.) and a human constant region. In some embodiments, a chimeric antibody is a “class switched” antibody in which the class or subclass has been changed from that of the parental antibody. Chimeric antibodies include antigen-binding fragments thereof. In some embodiments, the chimeric antibody is a mouse-human chimeric antibody.

[0108] In some embodiments, an antibody encoded by one or more polynucleotides of the present disclosure is a humanized antibody. Typically, a non-human antibody is humanized to reduce immunogenicity to humans, while retaining the specificity and affinity of the parental non-human antibody. Generally, a humanized antibody comprises one or more variable domains in which HVRs (or portions thereof) are derived from a non-human antibody, and FRs (or portions thereof) are derived from human antibody sequences. A humanized antibody optionally will also comprise at least a portion of a human constant region. In some embodiments, some FR residues in a humanized antibody are substituted with corresponding residues from a non-human antibody (e.g., the antibody from which the HVR residues are derived), e.g., to restore or improve antibody specificity and/or affinity.

[0109] Humanized antibodies, and methods of making the same, are reviewed, e.g., in Almagro and Fransson (2008) Front. Biosci. 13: 1619-1633, Riechmann et al. (1988) Nature 332: 323-329, Queen et al. (1989) PNAS USA 86: 10029-10033, U.S. Pat. Nos. 5,821,337, 7,527,791, 6,982,321, 7,087,409, Kashmiri et al. (2005) Methods 36: 25-34 (describing specificity determining region (SDR) grafting), Padlam (1991) Mol Immunol 28: 489-498 (describing “resurfacing”), Dall'Acqua et al. (2005) Methods 36: 43-60 (describing “FR shuffling”), Osbourn et al. (2005) Methods 36: 61-68, and Klimka et al. (2000) Br J Cancer 83: 252-260 (describing the “guided selection” approach to FR shuffling).

[0110] Human framework regions that may be used for humanization include, for example, framework regions selected using the “best-fit” method (see e.g., Sims et al. (1993) J Immunol 151: 2296), framework regions derived from the consensus sequence of human antibodies of a particular subgroup of light or heavy chain variable regions (see e.g., Carter et al. (1992) PNAS USA 89: 4285; see also Presta et al. (1993) J Immunol 151: 2623), human mature (somatically mutated) framework regions or human germline framework regions (see e.g., Almagro and Fransson (2008) Front Biosci 13: 1619-1633), and framework regions derived from screening FR libraries (see e.g., Baca et al. (1997) J Biol Chem 272: 10678-10684; see also Rosok et al. (1996) J Biol Chem 271: 22611-22618).

[0111] In some embodiments, an antibody encoded by one or more polynucleotides of the present disclosure is a human antibody. Human antibodies are generally described in van Dijk and van de Winkel (2001) Curr Opin Pharmacol 5: 368-74 and Lonberg (2008) Curr Opin Immunol 20: 450-459. Certain details regarding human antibodies can be found in, e.g., Hoogenboom and Winter, J. Mol. Biol. 227: 381 (1991); Marks et al. J. Mol. Biol. 222: 581 (1991); Cole et al. Monoclonal Antibodies and Cancer Therapy, p. 77 (1985); Boerner et al. J. Immunol. 147(1): 86-95 (1991); van Dijk and van de Winkel, Curr. Opin. Pharmacol. 5: 368-74 (2001); U.S. Pat. Nos. 6,075,181; 6,150,584; and Li et al. PNAS USA 103: 3557-3562 (2006).

[0112] In some embodiments, an antibody encoded by one or more polynucleotides of the present disclosure is a multispecific antibody (e.g., a bispecific antibody, a trispecific antibody, etc.). Techniques for making multispecific antibodies include, for example, recombinant co-expression of two immunoglobulin heavy chain-light chain pairs having different specificities (see e.g., Milstein and Cuello, Nature 305: 537 (1983), WO 93/08829, Traunecker et al. EMBO J. 10: 3655 (1991), and “knob-in-hole” engineering (e.g., as described in in U.S. Pat. No. 5,731,168)). Multispecific antibodies may also be made by engineering electrostatic steering effects for making antibody Fc-heterodimeric molecules (see e.g., WO2009/089004); cross-linking two or more antibodies or fragments (see e.g., U.S. Pat. No. 4,676,980, Brennan et al. Science, 229: 81 (1985)); using leucine zippers to produce bispecific antibodies (see e.g., Kostelny et al. J Immunol, 148(5): 1547-53 (1992)); using “diabody” technology for making bispecific antibody fragments (see e.g., Hollinger et al. PNAS USA 90:6444-8 (1993); using single-chain Fv dimers (see e.g., Gruber et al. J Immunol. 152:5368 (1994)); using dual acting Fabs (see e.g., US2008/0069820); and preparing trispecific or trivalent antibodies (see e.g., Tutt et al. J Immunol 147:60 (1991), WO2017/074878).

[0113] Antibodies (or antigen-binding fragments thereof) encoded by one or more polynucleotides of the present disclosure may contain: 1) an HVR-H1, HVR-H2, HVR-H3, HVR-L1, HVR-L2, and HVR-L3 of any antibody described herein or known in the art; 2) the heavy chain variable region and/or light chain variable region of any antibody described herein or known in the art; and/or 3) the full-length heavy chain and/or full-length light chain of any antibody described herein or known in the art. Examples of suitable antibodies that may be encoded by the polynucleotides of the present disclosure include, for example, abagovomab, abciximab (V_{H}—SEQ ID NO: 617; V_{L}—SEQ ID NO: 869), abituzumab (V_{H}—SEQ ID NO: 618; V_{L}—SEQ ID NO: 870), abrezekimab, abrilumab (V_{H}—SEQ ID NO: 619; V_{L}—SEQ ID NO: 871), actoxumab (V_{H}—SEQ ID NO: 620; V_{L}—SEQ ID NO: 872), adalimumab (V_{H}-SEQ ID NO: 355; V_{L}—SEQ ID NO: 420), adecatumumab, aducanumab (V_{H}—SEQ ID NO: 621; V_{L}—SEQ ID NO: 873), afasevikumab (V_{H}—SEQ ID NO: 622; V_{L}—SEQ ID NO: 874), afelimomab, afutuzumab, alacizumab (V_{H}—SEQ ID NO: 629; V_{L}—SEQ ID NO: 881), alemtuzumab (V_{H}—SEQ ID NO: 382; V_{L}—SEQ ID NO: 447), alirocumab (V_{H}—SEQ ID NO: 392; V_{L}—SEQ ID NO: 457), altumomab, amatuximab (V_{H}—SEQ ID NO: 623; V_{L}—SEQ ID NO: 875), anatumomab, andecaliximab (V_{H}—SEQ ID NO: 624; V_{L}—SEQ ID NO: 876), anetumab (V_{H}—SEQ ID NO: 625; V_{L}—SEQ ID NO: 877), anifrolumab (V_{H}—SEQ ID NO: 387; V_{L}—SEQ ID NO: 452), anrukinzumab (V_{H}—SEQ ID NO: 626; V_{L}—SEQ ID NO: 878), apolizumab, aprutumab (V_{H}—SEQ ID NO: 627; V_{L}—SEQ ID NO: 879), arcitumomab (V_{H}—SEQ ID NO: 628; V_{L}—SEQ ID NO: 880), ascrinvacumab, aselizumab, atezolizumab (V_{H}—SEQ ID NO: 374; V_{L}—SEQ ID NO: 439), atinumab, atlizumab, atorolimumab, avelumab (V_{H}—SEQ ID NO: 630; V_{L}—SEQ ID NO: 882), azintuxizumab (V_{H}—SEQ ID NO: 631; V_{L}—SEQ ID NO: 883), bapineuzumab (V_{H}—SEQ ID NO: 632; V_{L}—SEQ ID NO: 884), basiliximab (V_{H}—SEQ ID NO: 389; V_{L}—SEQ ID NO: 454), bavituximab (V_{H}—SEQ ID NO: 633; V_{L}—SEQ ID NO: 885), bectumomab, begelomab (V_{H}—SEQ ID NO: 634; V_{L}—SEQ ID NO: 886), belantamab (V_{H}—SEQ ID NO: 635; V_{L}—SEQ ID NO: 887), belimumab (V_{H}—SEQ ID NO: 388; V_{L}—SEQ ID NO: 453), bemarituzumab, belimumab, bemaritzumab (V_{H}—SEQ ID NO: 636; V_{L}—SEQ ID NO: 888), benralizumab (V_{H}—SEQ ID NO: 637; V_{L}—SEQ ID NO: 889), berlimatoxumab (V_{H}—SEQ ID NO: 638; V_{L}—SEQ ID NO: 890), bersanlimab (V_{H}—SEQ ID NO: 639; V_{L}—SEQ ID NO: 891), bertilimumab, besilesomab, bevacizumab (V_{H}—SEQ ID NO: 357; V_{L}—SEQ ID NO: 422), bezlotoxumab (V_{H}—SEQ ID NO: 640; V_{L}—SEQ ID NO: 892), biciromab, bimagrumab (V_{H}—SEQ ID NO: 415; V_{L}—SEQ ID NO:478), bimekizumab (V_{H}—SEQ ID NO: 641; V_{L}—SEQ ID NO: 893), birtamimab (V_{H}—SEQ ID NO: 642; V_{L}—SEQ ID NO: 894), bivatuzumab, bleselumab (V_{H}—SEQ ID NO: 643; V_{L}—SEQ ID NO: 895), blinatumomab (V_{H}—SEQ ID NO: 644; V_{L}—SEQ ID NO: 896), blontuvetmab (V_{H}—SEQ ID NO: 645; V_{L}—SEQ ID NO: 897), blosozumab (V_{H}—SEQ ID NO: 646; V_{L}—SEQ ID NO: 898), bococizumab (V_{H}—SEQ ID NO: 647; V_{L}—SEQ ID NO: 899), brazikumab (V_{H}—SEQ ID NO: 648; V_{L}—SEQ ID NO: 900), brentuximab (V_{H}—SEQ ID NO: 649; V_{L}—SEQ ID NO: 901), briakinumab (V_{H}—SEQ ID NO: 650; V_{L}—SEQ ID NO: 902), brodalumab (V_{H}—SEQ ID NO: 361; V_{L}—SEQ ID NO: 426), brolucizumab (V_{H}—SEQ ID NO: 651; V_{L}—SEQ ID NO: 903), brontictuzumab (V_{H}—SEQ ID NO: 652; V_{L}—SEQ ID NO: 904), burosumab (V_{H}—SEQ ID NO: 653; V_{L}—SEQ ID NO: 905), cabiralizumab (V_{H}—SEQ ID NO: 654; V_{L}—SEQ ID NO: 906), camidanlumab (V_{H}—SEQ ID NO: 655; V_{L}—SEQ ID NO: 907), camrelizumab (V_{H}—SEQ ID NO: 656; V_{L}—SEQ ID NO: 908), canakinumab (V_{H}—SEQ ID NO: 378; V_{L}—SEQ ID NO: 443), cantuzumab (V_{H}—SEQ ID NO: 657; V_{L}—SEQ ID NO: 909), caplacizumab, capromab, carlumab (V_{H}—SEQ ID NO: 658; V_{L}-SEQ ID NO: 910), carotuximab (V_{H}—SEQ ID NO: 659; V_{L}—SEQ ID NO: 911), catumaxomab, cedelizumab, cemiplimab (V_{H}—SEQ ID NO: 394; V_{L}—SEQ ID NO: 459), cergutuzumab (V_{H}—SEQ ID NO: 660; V_{L}—SEQ ID NO: 912), certolizumab (V_{H}—SEQ ID NO: 370; V_{L}—SEQ ID NO: 435), cetrelimab (V_{H}—SEQ ID NO: 661; V_{L}—SEQ ID NO: 913), cetuximab (V_{H}—SEQ ID NO: 662; V_{L}—SEQ ID NO: 914), cibisatamab (bispecific: V_{H1}—SEQ ID NO: 660; V_{L1}—SEQ ID NO: 915; V_{H2}—SEQ ID NO: 660; V_{L2}—SEQ ID NO: 912), citatuzumab (V_{H}—SEQ ID NO: 663; V_{L}—SEQ ID NO: 916), cixutumumab (V_{H}—SEQ ID NO: 664; V_{L}—SEQ ID NO: 917), clazakizumab (V_{H}—SEQ ID NO: 665; V_{L}—SEQ ID NO: 918), clenoliximab, clivatuzumab (V_{H}—SEQ ID NO: 666; V_{L}—SEQ ID NO: 919), codrituzumab (V_{H}—SEQ ID NO: 667; V_{L}—SEQ ID NO: 920), cofetuzumab (V_{H}—SEQ ID NO: 668; V_{L}—SEQ ID NO: 921), coltuximab (V_{H}—SEQ ID NO: 669; V_{L}—SEQ ID NO: 922), conatumumab (V_{H}—SEQ ID NO: 670; V_{L}—SEQ ID NO: 923), concizumab (V_{H}—SEQ ID NO: 671; V_{L}—SEQ ID NO: 924), cosfroviximab (V_{H}—SEQ ID NO: 672; V_{L}—SEQ ID NO: 925), crenezumab (V_{H}—SEQ ID NO: 673; V_{L}—SEQ ID NO: 926), crizanlizumab (V_{H}—SEQ ID NO: 674; V_{L}—SEQ ID NO: 927), crotedumab (V_{H}—SEQ ID NO: 675; V_{L}—SEQ ID NO: 928), cusatuzumab (V_{H}—SEQ ID NO: 676; V_{L}—SEQ ID NO: 929), dacetuzumab (V_{H}—SEQ ID NO: 677; V_{L}—SEQ ID NO: 930), daclizumab (V_{H}—SEQ ID NO: 390; V_{L}—SEQ ID NO: 455), dalotuzumab (V_{H}—SEQ ID NO: 678; V_{L}—SEQ ID NO: 931), dapirolizumab (V_{H}—SEQ ID NO: 679; V_{L}—SEQ ID NO: 932), daratumumab (V_{H}—SEQ ID NO: 680; V_{L}—SEQ ID NO: 933), dectrekumab (V_{H}—SEQ ID NO: 681; V_{L}—SEQ ID NO: 934), demcizumab (V_{H}—SEQ ID NO: 682; V_{L}—SEQ ID NO: 935), denintuzumab (V_{H}—SEQ ID NO: 683; V_{L}—SEQ ID NO: 936), denosumab (V_{H}—SEQ ID NO: 684; V_{L}—SEQ ID NO: 937), depatuxizumab (V_{H}—SEQ ID NO: 685; V_{L}—SEQ ID NO: 938), derlotuximab (V_{H}—SEQ ID NO: 686; V_{L}—SEQ ID NO: 939), detumomab, dezamizumab (V_{H}—SEQ ID NO: 687; V_{L}—SEQ ID NO: 940), dinutuximab (V_{H}—SEQ ID NO: 688; V_{L}—SEQ ID NO: 941), diridavumab (V_{H}—SEQ ID NO: 689; V_{L}—SEQ ID NO: 942), domagrozumab (V_{H}—SEQ ID NO: 690; V_{L}—SEQ ID NO: 943), dorlimomab, drozitumab (V_{H}—SEQ ID NO: 691; V_{L}—SEQ ID NO: 944), duligotuzumab (V_{H}—SEQ ID NO: 692; V_{L}—SEQ ID NO: 945), dupilumab (V_{H}—SEQ ID NO: 391; V_{L}—SEQ ID NO: 456), durvalumab (V_{H}—SEQ ID NO: 375; V_{L}—SEQ ID NO: 440), dusigitumab (V_{H}—SEQ ID NO: 693; V_{L}—SEQ ID NO: 946), duvortuxizumab (bispecific: V_{H1}—SEQ ID NO: 694; V_{L1}—SEQ ID NO: 947; V_{H2}—SEQ ID NO: 695; V_{L2}—SEQ ID NO: 948), ecromeximab, eculizumab (V_{H}—SEQ ID NO: 385; V_{L}—SEQ ID NO: 450), edobacomab, edrecolomab, efalizumab (V_{H}—SEQ ID NO: 696; V_{L}—SEQ ID NO: 949), efungumab, eldelumab (V_{H}—SEQ ID NO: 697; V_{L}—SEQ ID NO: 950), elezanumab (V_{H}—SEQ ID NO: 698; V_{L}—SEQ ID NO: 951), elgemtumab (V_{H}—SEQ ID NO: 699; V_{L}—SEQ ID NO: 952), elotuzumab (V_{H}—SEQ ID NO: 700; V_{L}—SEQ ID NO: 953), elsilimomab, emactuzumab (V_{H}—SEQ ID NO: 701; V_{L}—SEQ ID NO: 954), emapalumab (V_{H}—SEQ ID NO: 702; V_{L}—SEQ ID NO: 955), emibetuzumab (V_{H}—SEQ ID NO: 703; V_{L}—SEQ ID NO: 956), emicizumab (bispecific: V_{H1}—SEQ ID NO: 704; V_{L1}—SEQ ID NO: 957; V_{H2}—SEQ ID NO: 705; V_{L2}—SEQ ID NO: 957), enapotamab (V_{H}—SEQ ID NO: 706; V_{L}-SEQ ID NO: 958), enavatuzumab (V_{H}—SEQ ID NO: 707; V_{L}—SEQ ID NO: 959), enfortumab (V_{H}—SEQ ID NO: 708; V_{L}—SEQ ID NO: 960), enlimomab, enoblituzumab (V_{H}—SEQ ID NO: 371; V_{L}—SEQ ID NO: 436), enokizumab (V_{H}—SEQ ID NO: 709; V_{L}—SEQ ID NO: 961), enoticumab (V_{H}—SEQ ID NO: 710; V_{L}—SEQ ID NO: 962), ensituximab (V_{H}—SEQ ID NO: 711; V_{L}—SEQ ID NO: 963), epitumomab, epratuzumab (V_{H}—SEQ ID NO: 712; V_{L}—SEQ ID NO: 964), eptinezumab (V_{H}—SEQ ID NO: 713; V_{L}—SEQ ID NO: 965), erenumab (V_{H}—SEQ ID NO: 414; V_{L}—SEQ ID NO: 477), erlizumab, ertumaxomab, etaracizumab (V_{H}—SEQ ID NO: 714; V_{L}—SEQ ID NO: 966), etigilimab (V_{H}—SEQ ID NO: 715; V_{L}—SEQ ID NO: 967), etrolizumab (V_{H}—SEQ ID NO: 716; V_{L}—SEQ ID NO: 968), evinacumab (V_{H}—SEQ ID NO: 406; V_{L}—SEQ ID NO: 470), evolocumab (V_{H}—SEQ ID NO: 717; V_{L}—SEQ ID NO: 969), exbivirumab, fanolesomab, faralimomab, faricimab, farletuzumab (V_{H}—SEQ ID NO: 718; V_{L}—SEQ ID NO: 970), fasinumab (V_{H}—SEQ ID NO: 407; V_{L}—SEQ ID NO: 471), felvizumab fezakinumab (V_{H}—SEQ ID NO: 719; V_{L}—SEQ ID NO: 971), fibatuzumab, ficlatuzumab (V_{H}—SEQ ID NO: 720; V_{L}—SEQ ID NO: 972), figitumumab (V_{H}—SEQ ID NO: 721; V_{L}—SEQ ID NO: 973), firivumab (V_{H}—SEQ ID NO: 722; V_{L}—SEQ ID NO: 974), flanvotumab (V_{H}—SEQ ID NO: 723; V_{L}—SEQ ID NO: 975), fletikumab (V_{H}—SEQ ID NO: 724; V_{L}—SEQ ID NO: 976), flotetuzumab, fontolizumab, foralumab (V_{H}—SEQ ID NO: 725; V_{L}—SEQ ID NO: 977), foravirumab (V_{H}—SEQ ID NO: 726; V_{L}—SEQ ID NO: 978), fremanezumab, fresolimumab (SEQ ID NO: 396; V_{L}—SEQ ID NO: 461), frunevetmab, fulranumab (V_{H}—SEQ ID NO: 727; V_{L}—SEQ ID NO: 976), futuximab (V_{H}—SEQ ID NO: 728; V_{L}—SEQ ID NO: 979), galcanezumab (V_{H}—SEQ ID NO: 729; V_{L}—SEQ ID NO: 980), galiximab (V_{H}—SEQ ID NO: 730; V_{L}—SEQ ID NO: 981), gancotamab, ganitumab (V_{H}—SEQ ID NO: 731; V_{L}—SEQ ID NO: 982), gantenerumab (V_{H}—SEQ ID NO: 732; V_{L}—SEQ ID NO: 983), gatipotuzumab, gavilimomab, gedivumab, gemtuzumab (V_{H}—SEQ ID NO: 733; V_{L}—SEQ ID NO: 984), gevokizumab (V_{H}—SEQ ID NO: 734; V_{L}—SEQ ID NO: 985), gilvetmab, gimsilumab, girentuximab (V_{H}—SEQ ID NO: 735; V_{L}—SEQ ID NO: 986), glembatumumab (V_{H}—SEQ ID NO: 736; V_{L}—SEQ ID NO: 987), golimumab (V_{H}—SEQ ID NO: 369; V_{L}—SEQ ID NO: 434), gomiliximab, gosuranemab, guselkumab (V_{H}—SEQ ID NO: 362; V_{L}—SEQ ID NO: 427), ianalumab, ibalizumab (V_{H}—SEQ ID NO: 737; V_{L}—SEQ ID NO: 988), ibritumomab, icrucumab (V_{H}—SEQ ID NO: 738; V_{L}—SEQ ID NO: 989), idarucizumab (V_{H}—SEQ ID NO: 739; V_{L}—SEQ ID NO: 990), ifabotuzumab, igovomab, iladatuzumab, imalumab (V_{H}—SEQ ID NO: 740; V_{L}—SEQ ID NO: 991), imaprelimab, imciromab, imgatuzumab (V_{H}—SEQ ID NO: 741; V_{L}—SEQ ID NO: 992), inclacumab (V_{H}—SEQ ID NO: 742; V_{L}—SEQ ID NO: 993), indatuximab (V_{H}—SEQ ID NO: 743; V_{L}—SEQ ID NO: 994), indusatumab (V_{H}—SEQ ID NO: 744; V_{L}—SEQ ID NO: 995), inebilizumab, inflectra, infliximab (V_{H}—SEQ ID NO: 365; V_{L}—SEQ ID NO: 430), intetumumab (V_{H}—SEQ ID NO: 745; V_{L}—SEQ ID NO: 996), inolimomab, inotuzumab (V_{H}—SEQ ID NO: 746; V_{L}—SEQ ID NO: 997), ipilimumab (V_{H}—SEQ ID NO: 372; V_{L}—SEQ ID NO: 437), iratumumab, isatuximab (V_{H}—SEQ ID NO: 393; V_{L}—SEQ ID NO: 458), iscalimab, istiratumab, itolizumab (V_{H}—SEQ ID NO: 747; V_{L}—SEQ ID NO: 998), ixekizumab (V_{H}—SEQ ID NO: 360; V_{L}—SEQ ID NO: 425), keliximab, labetuzumab (V_{H}—SEQ ID NO: 748; V_{L}—SEQ ID NO: 999), lacnotuzumab, ladiratuzumab, lampalizumab (V_{H}—SEQ ID NO: 749; V_{L}—SEQ ID NO: 1000), lanadelumab, landogrozumab (V_{H}—SEQ ID NO: 750; V_{L}—SEQ ID NO: 1001), laprituximab, larcaviximab, lebrikizumab (V_{H}—SEQ ID NO: 751; V_{L}—SEQ ID NO: 1002), lemalesomab, lendalizumab, lenvervimab, lenzilumab (V_{H}—SEQ ID NO: 752; V_{L}—SEQ ID NO: 1003), lerdelimumab, leronlimab, lesofavumab, letolizumab, lexatumumab, libivirumab, lifastuzumab (V_{H}—SEQ ID NO: 753; V_{L}—SEQ ID NO: 1004), ligelizumab (V_{H}—SEQ ID NO: 417; V_{L}—SEQ ID NO: 480), loncastuximab, losatuxizumab, lilotomab (V_{H}—SEQ ID NO: 754; V_{L}—SEQ ID NO: 1005), lintuzumab (V_{H}—SEQ ID NO: 755; V_{L}—SEQ ID NO: 1006), lirilumab (V_{H}—SEQ ID NO: 756; V_{L}—SEQ ID NO: 1007), lodelcizumab (V_{H}—SEQ ID NO: 757; V_{L}—SEQ ID NO: 1008), lokivetmab (V_{H}—SEQ ID NO: 758; V_{L}—SEQ ID NO: 1009), lorvotuzumab (V_{H}—SEQ ID NO: 759; V_{L}—SEQ ID NO: 1010), lucatumumab, lulizumab, lumiliximab (V_{H}—SEQ ID NO: 760; V_{L}—SEQ ID NO: 1011), lumretuzumab (V_{H}—SEQ ID NO: 761; V_{L}—SEQ ID NO: 1012), lupartumab, lutikizumab, mapatumumab, margetuximab (V_{H}—SEQ ID NO: 762; V_{L}—SEQ ID NO: 1013), marstacimab, maslimomab, mavrilimumab (V_{H}—SEQ ID NO: 366; V_{L}—SEQ ID NO: 431), matuzumab (V_{H}—SEQ ID NO: 763; V_{L}—SEQ ID NO: 1014), mepolizumab (V_{H}—SEQ ID NO: 764; V_{L}—SEQ ID NO: 1015), metelimumab, milatuzumab (V_{H}—SEQ ID NO: 765; V_{L}—SEQ ID NO: 1016), minretumomab, mirikizumab, mirvetuximab (V_{H}—SEQ ID NO: 766; V_{L}—SEQ ID NO: 1017), mitumomab, modotuximab (V_{H}—SEQ ID NO: 767; V_{L}—SEQ ID NO: 1018), mogamulizumab (V_{H}—SEQ ID NO: 768; V_{L}—SEQ ID NO: 1019), monalizumab (V_{H}—SEQ ID NO: 769; V_{L}—SEQ ID NO: 1020), morolimumab, mosunetuzumab, motavizumab (V_{H}—SEQ ID NO: 770; V_{L}—SEQ ID NO: 1021), moxetumomab, muromonab (V_{H}—SEQ ID NO: 771; V_{L}—SEQ ID NO: 1022), nacolomab, namilumab (V_{H}—SEQ ID NO: 772; V_{L}—SEQ ID NO: 1023), naptumomab, naratuximab, narnatumab (V_{H}—SEQ ID NO: 773; V_{L}—SEQ ID NO: 1024), natalizumab (V_{H}—SEQ ID NO: 384; V_{L}—SEQ ID NO: 449), navicixizumab, navivumab (V_{H}—SEQ ID NO: 774; V_{L}—SEQ ID NO: 1025), naxitamab, nebacumab, necitumumab (V_{H}—SEQ ID NO: 775; V_{L}—SEQ ID NO: 1026), nemolizumab (V_{H}—SEQ ID NO: 776; V_{L}—SEQ ID NO: 1027), nerelimomab, nesvacumab (V_{H}—SEQ ID NO: 777; V_{L}—SEQ ID NO: 1028), netakimab, nimotuzumab, nirsevimab, nivolumab (V_{H}—SEQ ID NO: 376; V_{L}—SEQ ID NO: 441), nofetumomab, obiltoxaximab (V_{H}—SEQ ID NO: 778; V_{L}—SEQ ID NO: 1029), obinutuzumab (V_{H}—SEQ ID NO: 779; V_{L}—SEQ ID NO: 1030), ocaratuzumab (V_{H}—SEQ ID NO: 780; V_{L}—SEQ ID NO: 1031), ocrelizumab (V_{H}—SEQ ID NO: 379; V_{L}—SEQ ID NO: 444), odulimomab, ofatumumab (V_{H}—SEQ ID NO: 380; V_{L}—SEQ ID NO: 445), olaratumab (V_{H}—SEQ ID NO: 781; V_{L}—SEQ ID NO: 1032), oleclumab, olendalizumab, olokizumab (V_{H}—SEQ ID NO: 782; V_{L}—SEQ ID NO: 1033), omalizumab (V_{H}—SEQ ID NO: 418; V_{L}—SEQ ID NO: 481), onartuzumab (V_{H}—SEQ ID NO: 783; V_{L}—SEQ ID NO: 1034), ontuxizumab (V_{H}—SEQ ID NO: 37; V_{L}—SEQ ID NO: 438), onvatilimab, opicinumab (V_{H}—SEQ ID NO: 383; V_{L}—SEQ ID NO: 448), oportuzumab, oregovomab, orticumab (V_{H}—SEQ ID NO: 784; V_{L}—SEQ ID NO: 1035), otelixizumab (V_{H}—SEQ ID NO: 785; V_{L}—SEQ ID NO: 1036), otilimab, otlertuzumab (V_{H}—SEQ ID NO: 786; V_{L}—SEQ ID NO: 1037), oxelumab (V_{H}—SEQ ID NO: 787; V_{L}—SEQ ID NO: 1038), ozanezumab (V_{H}—SEQ ID NO: 788; V_{L}—SEQ ID NO: 1039), ozoralizumab, pagibaximab, palivizumab (V_{H}—SEQ ID NO: 789; V_{L}—SEQ ID NO: 1040), pamrevlumab (V_{H}—SEQ ID NO: 790; V_{L}—SEQ ID NO: 1041), panitumumab (V_{H}—SEQ ID NO: 791; V_{L}—SEQ ID NO: 1042), pankomab, panobacumab (V_{H}—SEQ ID NO: 792; V_{L}—SEQ ID NO: 1043), parsatuzumab (V_{H}—SEQ ID NO: 793; V_{L}—SEQ ID NO: 1044), pascolizumab, pasotuxizumab, pateclizumab (V_{H}—SEQ ID NO: 794; V_{L}—SEQ ID NO: 1045), patritumab (V_{H}—SEQ ID NO: 795; V_{L}—SEQ ID NO: 1046), pembrolizumab (V_{H}—SEQ ID NO: 377; V_{L}—SEQ ID NO: 442), pemtumomab, perakizumab (V_{H}—SEQ ID NO: 796; V_{L}—SEQ ID NO: 1047), pertuzumab (V_{H}—SEQ ID NO: 797; V_{L}—SEQ ID NO: 1048), pexelizumab, pidilizumab (V_{H}—SEQ ID NO: 798; V_{L}—SEQ ID NO: 1049), pinatuzumab (V_{H}—SEQ ID NO: 799; V_{L}—SEQ ID NO: 1050), pintumomab, placulumab, plozalizumab (V_{H}—SEQ ID NO: 800; V_{L}—SEQ ID NO: 1051), pogalizumab, polatuzumab (V_{H}—SEQ ID NO: 801; V_{L}—SEQ ID NO: 1052), ponezumab (V_{H}—SEQ ID NO: 802; V_{L}—SEQ ID NO: 1053), porgaviximab, prasinezumab, prezalizumab, priliximab, pritoxaximab (V_{H}—SEQ ID NO: 803; V_{L}—SEQ ID NO: 1054), pritumumab, quilizumab (V_{H}—SEQ ID NO: 804; V_{L}—SEQ ID NO: 1055), racotumomab (V_{H}—SEQ ID NO: 805; V_{L}—SEQ ID NO: 1056), radretumab (V_{H}—SEQ ID NO: 806; V_{L}—SEQ ID NO: 1057), rafivirumab (V_{H}—SEQ ID NO: 807; V_{L}—SEQ ID NO: 1058), ralpancizumab (V_{H}—SEQ ID NO: 808; V_{L}—SEQ ID NO: 1059), ramucirumab (V_{H}—SEQ ID NO: 809; V_{L}—SEQ ID NO: 1060), ranevetmab, ranibizumab (V_{H}—SEQ ID NO: 416; V_{L}—SEQ ID NO: 479), raxibacumab, ravagalimab, ravulizumab, refanezumab (V_{H}—SEQ ID NO: 810; V_{L}—SEQ ID NO: 1061), regavirumab, remtolumab, reslizumab (V_{H}—SEQ ID NO: 811; V_{L}—SEQ ID NO: 1062), rilotumumab (V_{H}—SEQ ID NO: 812; V_{L}—SEQ ID NO: 1063), rinucumab (V_{H}—SEQ ID NO: 813; V_{L}—SEQ ID NO: 1064), risankizumab (V_{H}—SEQ ID NO: 363; V_{L}—SEQ ID NO: 428), rituximab (V_{H}—SEQ ID NO: 356; V_{L}—SEQ ID NO: 421), rivabazumab (V_{H}—SEQ ID NO: 814; V_{L}—SEQ ID NO: 1065), robatumumab (V_{H}—SEQ ID NO: 815; V_{L}—SEQ ID NO: 1066), roledumab (V_{H}—SEQ ID NO: 816; V_{L}—SEQ ID NO: 1067), romilkimab, romosozumab (V_{H}—SEQ ID NO: 817; V_{L}—SEQ ID NO: 1068), rontalizumab (V_{H}—SEQ ID NO: 818; V_{L}—SEQ ID NO: 1069), rosmantuzumab, rovalpituzumab (V_{H}—SEQ ID NO: 819; V_{L}—SEQ ID NO: 1070), rovelizumab, rozanolixizumab, ruplizumab, sacituzumab (V_{H}—SEQ ID NO: 820; V_{L}—SEQ ID NO: 1071), samalizumab (V_{H}—SEQ ID NO: 821; V_{L}—SEQ ID NO: 1072), samrotamab, sapelizumab, sarilumab (V_{H}—SEQ ID NO: 368; V_{L}—SEQ ID NO: 433), satralizumab (V_{H}—SEQ ID NO: 386; V_{L}—SEQ ID NO: 451), satumomab (V_{H}—SEQ ID NO: 822; V_{L}—SEQ ID NO: 1073), secukinumab (V_{H}—SEQ ID NO: 359; V_{L}—SEQ ID NO: 424), selicrelumab, seribantumab (V_{H}—SEQ ID NO: 823; V_{L}—SEQ ID NO: 1074), setoxaximab (V_{H}—SEQ ID NO: 824; V_{L}—SEQ ID NO: 1075), setrusumab, sevirumab, sibrotuzumab, sifalimumab (V_{H}—SEQ ID NO: 825; V_{L}—SEQ ID NO: 1076), siltuximab (V_{H}—SEQ ID NO: 826; V_{L}—SEQ ID NO: 1077), simtuzumab (V_{H}—SEQ ID NO: 827; V_{L}—SEQ ID NO: 1078), siplizumab, sirtratumab, sirukumab (V_{H}—SEQ ID NO: 828; V_{L}—SEQ ID NO: 1079), sofituzumab (V_{H}—SEQ ID NO: 829; V_{L}—SEQ ID NO: 1080), solanezumab (V_{H}—SEQ ID NO: 830; V_{L}—SEQ ID NO: 1081), solitomab, sonepcizumab, sontuzumab, spartalizumab, stamulumab, sulesomab, suptavumab, sutimlimab, suvizumab (V_{H}—SEQ ID NO: 831; V_{L}—SEQ ID NO: 1082), suvratoxumab, tabalumab (V_{H}—SEQ ID NO: 832; V_{L}—SEQ ID NO: 1083), tacatuzumab, tadocizumab, talacotuzumab, talizumab, tamtuvetmab, tanezumab (V_{H}—SEQ ID NO: 833; V_{L}—SEQ ID NO: 1084), taplitumomab, tarextumab (V_{H}—SEQ ID NO: 834; V_{L}—SEQ ID NO: 1085), tavolimab, tefibazumab, telimomab, telisotuzumab, tenatumomab (V_{H}—SEQ ID NO: 835; V_{L}—SEQ ID NO: 1086), teneliximab, teplizumab (V_{H}—SEQ ID NO: 836; V_{L}—SEQ ID NO: 1087), tepoditamab, teprotumumab (V_{H}—SEQ ID NO: 837; V_{L}—SEQ ID NO: 1088), tesidolumab (V_{H}—SEQ ID NO: 838; V_{L}—SEQ ID NO: 1089), tetulomab, tezepelumab (V_{H}—SEQ ID NO: 839; V_{L}—SEQ ID NO: 1090), tibulizumab, tildrakizumab (V_{H}—SEQ ID NO: 364; V_{L}—SEQ ID NO: 429), tigatuzumab (V_{H}—SEQ ID NO: 840; V_{L}—SEQ ID NO: 1091), timigutuzumab, timolumab (V_{H}—SEQ ID NO: 841; V_{L}—SEQ ID NO: 1092), tiragotumab, tislelizumab, tisotumab (V_{H}—SEQ ID NO: 842; V_{L}—SEQ ID NO: 1093), tocilizumab (V_{H}—SEQ ID NO: 367; V_{L}—SEQ ID NO: 432), tomuzotuximab, toralizumab, tosatoxumab (V_{H}—SEQ ID NO: 843; V_{L}—SEQ ID NO: 1094), tositumomab, tovetumab (V_{H}—SEQ ID NO: 844; V_{L}—SEQ ID NO: 1095), tralokinumab (V_{H}—SEQ ID NO: 845; V_{L}—SEQ ID NO: 1096), trastuzumab (V_{H}—SEQ ID NO: 846; V_{L}—SEQ ID NO: 1097), tregalizumab (V_{H}—SEQ ID NO: 847; V_{L}—SEQ ID NO: 1098), tremelimumab (V_{H}—SEQ ID NO: 848; V_{L}—SEQ ID NO: 1099), trevogrumab (V_{H}—SEQ ID NO: 849; V_{L}—SEQ ID NO: 1100), tucotuzumab, tuvirumab, ublituximab (V_{H}—SEQ ID NO: 381; V_{L}—SEQ ID NO: 446), ulocuplumab (V_{H}—SEQ ID NO: 850; V_{L}—SEQ ID NO: 1101), urelumab (V_{H}—SEQ ID NO: 851; V_{L}—SEQ ID NO: 1102), urtoxazumab, ustekinumab (V_{H}—SEQ ID NO: 358; V_{L}—SEQ ID NO: 423), utomilumab, vadastuximab (V_{H}—SEQ ID NO: 852; V_{L}—SEQ ID NO: 1103), vanalimab, vandortuzumab (V_{H}—SEQ ID NO: 853; V_{L}—SEQ ID NO: 1104), vantictumab (V_{H}—SEQ ID NO: 854; V_{L}—SEQ ID NO: 1105), vanucizumab (bispecific: V_{H1}-SEQ ID NO: 855; VLi-SEQ ID NO: 1106; V_{H2}—SEQ ID NO: 357; V_{L2}—SEQ ID NO: 422), vapaliximab, varisacumab, varlilumab (V_{H}—SEQ ID NO: 856; V_{L}—SEQ ID NO: 1107), vatelizumab (V_{H}—SEQ ID NO: 857; V_{L}—SEQ ID NO: 1108), vedolizumab (V_{H}—SEQ ID NO: 858; V_{L}—SEQ ID NO: 1109), veltuzumab (V_{H}—SEQ ID NO: 859; V_{L}—SEQ ID NO: 1110), vepalimomab, vesencumab (V_{H}—SEQ ID NO: 860; V_{L}—SEQ ID NO: 1111), visilizumab (V_{H}—SEQ ID NO: 861; V_{L}—SEQ ID NO: 1112), vobarilizumab, volociximab, vonlerolizumab, vopratelimab, vorsetuzumab (V_{H}—SEQ ID NO: 862; V_{L}—SEQ ID NO: 1113), votumumab, vunakizumab, xentuzumab (V_{H}—SEQ ID NO: 863; V_{L}—SEQ ID NO: 1114), zalutumumab (V_{H}—SEQ ID NO: 864; V_{L}—SEQ ID NO: 1115), zanolimumab (V_{H}—SEQ ID NO: 865; V_{L}—SEQ ID NO: 1116), zatuximab, zenocutuzumab, ziralimumab, zolbetuximab, and zolimomab. In some embodiments, the antibody is not any one or more of the antibodies described above (e.g., does not comprise a heavy chain variable region and/or a light chain variable region of any one or more of the antibodies described above). In some embodiments, the antibody is not an anti-CTLA4 antibody and/or an anti-PD-L1 antibody.

[0114] In some embodiments, an antibody of the present disclosure comprises a light chain variable region having at least 75%, at least 80%, at least 85%, at least 86%, at least 87%, at least 88%, at least 89%, at least 90%, at least 91%, at least 92%, at least 93%, at least 94%, at least 95%, at least 96%, at least 97%, at least 98%, at least 99%, or 100% sequence identity to the sequence of the light chain variable region of any of the antibodies described herein or known in the art (e.g., an antibody of the present disclosure comprises a light chain variable region having at least 75%, at least 80%, at least 85%, at least 86%, at least 87%, at least 88%, at least 89%, at least 90%, at least 91%, at least 92%, at least 93%, at least 94%, at least 95%, at least 96%, at least 97%, at least 98%, at least 99%, or 100% sequence identity to the sequence of any of the light chain variable regions disclosed in the previous paragraph). In some embodiments, an antibody of the present disclosure comprises a heavy chain variable region having at least 75%, at least 80%, at least 85%, at least 86%, at least 87%, at least 88%, at least 89%, at least 90%, at least 91%, at least 92%, at least 93%, at least 94%, at least 95%, at least 96%, at least 97%, at least 98%, at least 99%, or 100% sequence identity to the sequence of the heavy chain variable region of any of the antibodies described herein or known in the art (e.g., an antibody of the present disclosure comprises a heavy chain variable region having at least 75%, at least 80%, at least 85%, at least 86%, at least 87%, at least 88%, at least 89%, at least 90%, at least 91%, at least 92%, at least 93%, at least 94%, at least 95%, at least 96%, at least 97%, at least 98%, at least 99%, or 100% sequence identity to the sequence of any of the heavy chain variable regions disclosed in the previous paragraph). In some embodiments, an antibody of the present disclosure comprises a light chain variable region and a heavy chain variable region having at least 75%, at least 80%, at least 85%, at least 86%, at least 87%, at least 88%, at least 89%, at least 90%, at least 91%, at least 92%, at least 93%, at least 94%, at least 95%, at least 96%, at least 97%, at least 98%, at least 99%, or 100% sequence identity to the sequence of the light and heavy chain variable regions of any of the antibodies described herein or known in the art (e.g., an antibody of the present disclosure comprises a light and heavy chain variable region having at least 75%, at least 80%, at least 85%, at least 86%, at least 87%, at least 88%, at least 89%, at least 90%, at least 91%, at least 92%, at least 93%, at least 94%, at least 95%, at least 96%, at least 97%, at least 98%, at least 99%, or 100% sequence identity, respectively, to the sequence of any of the light and heavy chain variable regions disclosed in the previous paragraph).

[0115] Exemplary Antibody Sequences

[0116] In some embodiments, one or more polynucleotides of the present disclosure encode an antibody (e.g., a full-length antibody, an antibody fragment, etc.) comprising a heavy chain variable region comprising an HVR-H1, HVR-H2, and/or an HVR-H3 of any of the antibodies described herein or known in the art. Methods of identifying the HVR-H1, HVR-H2, and/or HVR-H3 in a given heavy chain variable region are generally known to one of ordinary skill in the art (see e.g., the methods employed at abysis.org; Al-Lazikani et al., (1997) JMB 273, 927-948; Martin, A. C. R. (1996) Proteins 25(1):130-3; etc.). In some embodiments, one or more polynucleotides of the present disclosure encode an antibody comprising a heavy chain variable region comprising one, two, or three HVRs selected from: an HVR-H1 comprising a sequence selected from SEQ ID NOS: 1-59; an HVR-H2 comprising a sequence selected from SEQ ID NOS: 60-122; and/or an HVR-H3 comprising a sequence selected from SEQ ID NOS: 123-185. In some embodiments, one or more polynucleotides of the present disclosure encode an antibody comprising a heavy chain variable region comprising the HVR-H1, HVR-H2, and HVR-H3 of any of the antibodies depicted in Table 1. In some embodiments, one or more polynucleotides of the present disclosure encode an antibody comprising a heavy chain variable region comprising the HVR-H1, HVR-H2, and HVR-H3 of any of the heavy chain variable regions depicted in Table 2 or described in SEQ ID NOS: 355-419 or 614-865.

[0117] In some embodiments, one or more polynucleotides of the present disclosure encode an antibody comprising a light chain variable region comprising an HVR-L1, HVR-L2, and/or an HVR-L3 of any of the antibodies described herein or known in the art. Methods of identifying the HVR-L1, HVR-L2, and/or HVR-L3 in a given light chain variable region are generally known to one of ordinary skill in the art (see e.g., the methods employed at abysis.org; Al-Lazikani et al., (1997) JMB 273, 927-948; Martin, A. C. R. (1996) Proteins 25(1):130-3; etc.). In some embodiments, one or more polynucleotides of the present disclosure encode an antibody comprising a light chain variable region comprising one, two, or three HVRs selected from: an HVR-L1 comprising a sequence selected from SEQ ID NOS: 186-242; an HVR-L2 comprising a sequence selected from SEQ ID NOS: 243-294; and/or an HVR-L3 comprising a sequence selected from SEQ ID NOS: 295-354. In some embodiments, one or more polynucleotides of the present disclosure encode an antibody comprising a light chain variable region comprising the HVR-L1, HVR-L2, and HVR-L3 of any of the antibodies depicted in Table 1. In some embodiments, one or more polynucleotides of the present disclosure encode an antibody comprising a light chain variable region comprising the HVR-L1, HVR-L2, and HVR-L3 of any of the light chain variable regions depicted in Table 2 or disclosed in SEQ ID NOS: 420-482 or 866-1116.

[0118] In some embodiments, one or more polynucleotides of the present disclosure encode an antibody comprising a heavy chain variable region comprising an HVR-H1, HVR-H2, and/or an HVR-H3 of any of the antibodies described herein or known in the art, and a light chain variable region comprising an HVR-L1, HVR-L2, and/or and HVR-L3 of any of the antibodies described herein or known in the art. In some embodiments, one or more polynucleotides of the present disclosure encode an antibody comprising: a heavy chain variable region comprising one, two, or three HVRs selected from: an HVR-H1 comprising a sequence selected from SEQ ID NOS: 1-59; an HVR-H2 comprising a sequence selected from SEQ ID NOS: 60-122; and/or an HVR-H3 comprising a sequence selected from SEQ ID NOS: 123-185; and a light chain variable region comprising one, two, or three HVRs selected from: an HVR-L1 comprising a sequence selected from SEQ ID NOS: 186-242; an HVR-L2 comprising a sequence selected from SEQ ID NOS: 243-294; and/or an HVR-L3 comprising a sequence selected from SEQ ID NOS: 295-354. In some embodiments, one or more polynucleotides of the present disclosure encode an antibody comprising the HVR-H1, HVR-H2, HVR-H3, HVR-L1, HVR-L2, and HVR-L3 of any of the antibodies depicted in Table 1. In some embodiments, one or more polynucleotides of the present disclosure encode an antibody comprising the HVR-H1, HVR-H2, HVR-H3, HVR-L1, HVR-L2, and HVR-L3 of any of the heavy chain variable regions and light chain variable regions depicted in Table 2 or disclosed in SEQ ID NOS: 355-419, 420-482, 614-865, or 86-1116.

TABLE 1
HVRs of exemplary antibodies

| Ab | | | | | | |
|---|---|---|---|---|---|---|
| Name: | HVR-H1: | HVR-H2: | HVR-H3: | HVR-L1: | HVR-L2: | HVR-L3: |
| HSV- | DYAMH | AITWNSGHIDY | VSYLSTASSLD | RASQGIRNYLA | AASTLQS | QRYNRAPYT |
| AB1 | (SEQ ID NO: 1) | ADSVEG | Y | (SEQ ID NO: 186) | (SEQ ID NO: 243) | (SEQ ID NO: 295) |
| | | (SEQ ID NO: 60) | (SEQ ID NO: 123) | | | |
| HSV- | SYNMH | AIYPGNGDTSY | STYYGGDWYF | RASSSVSYIH | ATSNLAS | QQWTSNPPT |
| AB2 | (SEQ ID NO: 2) | NQKFKG | NV | (SEQ ID NO: 187) | (SEQ ID NO: 244) | (SEQ ID NO: 296) |
| | | (SEQ ID NO: 61) | (SEQ ID NO: 124) | | | |
| HSV- | NYGMN | WINTYTGEPTY | YPHYYGSSHW | SASQDISNYLN | FTSSLHS | QQYSTVPWT |
| AB3 | (SEQ ID NO: 3) | AADFKR | YFDV | (SEQ ID NO: 188) | (SEQ ID NO: 245) | (SEQ ID NO: 297) |
| | | (SEQ ID NO: 62) | (SEQ ID NO: 125) | | | |
| HSV- | TYWLG | IMSPVDSDIRYS | RRPGQGYFDF | RASQGISSWLA | AASSLQS | QQYNIYPYT |
| AB4 | (SEQ ID NO: 4) | PSFQG | (SEQ ID NO: 126) | (SEQ ID NO: 189) | (SEQ ID NO: 246) | (SEQ ID NO: 298) |
| | | (SEQ ID NO: 63) | | | | |
| HSV- | NYWMN | AINQDGSEKYY | DYYDILTDYYI | RASQSVSSSYL | GASSRAT | QQYGSSPCT |
| ABS | (SEQ ID NO: 5) | VGSVKG | HYWYFDL | A | (SEQ ID NO: 247) | (SEQ ID NO: 299) |
| | | (SEQ ID NO: 64) | (SEQ ID NO: 127) | (SEQ ID NO: 190) | | |
| HSV- | DYHIH | VINPMYGTTDY | YDYFTGTGVY | RSSRSLVHSRG | KVSNRFI | SQSTHLPFT |
| AB6 | (SEQ ID NO: 6) | NQRFKG | (SEQ ID NO: 128) | NTYLH | (SEQ ID NO: 248) | (SEQ ID NO: 300) |
| | | (SEQ ID NO: 65) | | (SEQ ID NO: 191) | | |
| HSV- | RYGIS | WISTYSGNTNY | RQLYFDY | RASQSVSSNLA | DASTRAT | QQYDNWPLT |
| AB7 | (SEQ ID NO: 7) | AQKLQG | (SEQ ID NO: 129) | (SEQ ID NO: 192) | (SEQ ID NO: 249) | (SEQ ID NO: 301) |
| | | (SEQ ID NO: 66) | | | | |
| HSV- | NYWIG | IIDPSNSYTRYSP | WYYKPFDV | TGSSNIGSGYD | GNSKRPS | ASWTDGLSLVV |
| AB8 | (SEQ ID NO: 8) | SFQG | (SEQ ID NO: 130) | VH | (SEQ ID NO: 250) | (SEQ ID NO: 302) |
| | | (SEQ ID NO: 67) | | (SEQ ID NO: 193) | | |
| HSV- | DQTIH | YIYPRDDSPKY | PDRSGYAWFIY | KASRDVAIAVA | WASTRHT | HQYSSYPFT |
| AB9 | (SEQ ID NO: 9) | NENFKG | (SEQ ID NO: 131) | (SEQ ID NO: 194) | (SEQ ID NO: 251) | (SEQ ID NO: 303) |
| | | (SEQ ID NO: 68) | | | | |
| HSV- | TYWMT | QIFPASGSADYN | GGGGFAY | RTSENIYSYLA | NAKTLAE | QHHYGIPFT |
| AB10 | (SEQ ID NO: 10) | EKFEG | (SEQ ID NO: 132) | (SEQ ID NO: 195) | (SEQ ID NO: 252) | (SEQ ID NO: 304) |
| | | (SEQ ID NO: 69) | | | | |
| HSV- | NHWMN | EIRSKSINSATH | NYYGSTYDY | RASQFVGSSIH | YASESMS | QQSHSWPFT |
| AB11 | (SEQ ID NO: 11) | YAESV | (SEQ ID NO: 133) | (SEQ ID NO: 196) | (SEQ ID NO: 253) | (SEQ ID NO: 305) |
| | | (SEQ ID NO: 70) | | | | |
| HSV- | NHWMN | EIRSKSINSATH | NYYGSTYDY | RASQFVGSSIH | YASESMS | QQSHSWPFT |
| AB11.1 | (SEQ ID NO: 12) | YAESV | (SEQ ID NO: 133) | (SEQ ID NO: 196) | (SEQ ID NO: 253) | (SEQ ID NO: 305) |
| | | (SEQ ID NO: 70) | | | | |
| HSV- | NHWMN | EIRSKSINSATH | NYYGSTYDY | RASQFVGSSIH | YASESMS | QQSHSWPFT |
| AB11.2 | (SEQ ID NO: 13) | YAESV | (SEQ ID NO: 133) | (SEQ ID NO: 196) | (SEQ ID NO: 253) | (SEQ ID NO: 305) |
| | | (SEQ ID NO: 70) | | | | |
| HSV- | ELSIH | GFDPEENEIVYA | VGSFSPLTLGL | TGSGSNIGAPY | HNNKRPS | ATVEAGLSGSV |
| AB12 | (SEQ ID NO: 14) | QRFQG | (SEQ ID NO: 134) | DVS | (SEQ ID NO: 254) | (SEQ ID NO: 306) |
| | | (SEQ ID NO: 71) | | (SEQ ID NO: 197) | | |
| HSV- | SDHAWS | YISYSGITTYNP | SLARTTAMDY | RASQDISSYLN | YTSRLHS | QQGNTLPYT |
| AB13 | (SEQ ID NO: 15) | SLKS | (SEQ ID NO: 135) | (SEQ ID NO: 198) | (SEQ ID NO: 255) | (SEQ ID NO: 307) |
| | | (SEQ ID NO: 72) | | | | |
| HSV- | DYAMH | GISWNSGRIGY | GRDSFDI | RASQGISSWLA | GASSLES | QQANSFPYT |
| AB14 | (SEQ ID NO: 1) | ADSVKG | (SEQ ID NO: 136) | (SEQ ID NO: 189) | (SEQ ID NO: 256) | (SEQ ID NO: 308) |
| | | (SEQ ID NO: 73) | | | | |
| HSV- | SYAMH | FMSYDGSNKKY | DRGIAAGGNYY | RASQSVYSYLA | DASNRAT | QQRSNWPPFT |
| AB15 | (SEQ ID NO: 16) | ADSVKG | YYGMDV | (SEQ ID NO: 199) | (SEQ ID NO: 257) | (SEQ ID NO: 309) |
| | | (SEQ ID NO: 74) | (SEQ ID NO: 137) | | | |
| HSV- | DYGMN | WINTYIGEPIYA | GYRSYAMDY | KASQNVGTNV | SASFLYS | QQYNIYPLT |
| AB16 | (SEQ ID NO: 17) | DSVKG | (SEQ ID NO: 138) | A | (SEQ ID NO: 258) | (SEQ ID NO: 310) |
| | | (SEQ ID NO: 75) | | (SEQ ID NO: 200) | | |
| HSV- | SFGMH | YISSDSSAIYYA | GRENIYYGSRL | KASQNVDTNV | SASYRYS | QQYNNYPFT |
| AB17 | (SEQ ID NO: 18) | DTVKG (SEQ ID | DY | A | (SEQ ID NO: 259) | (SEQ ID NO: 311) |
| | | NO: 76) | (SEQ ID NO: 139) | (SEQ ID NO: 201) | | |
| HSV- | SYTMH | FISYDGNNKYY | TGWLGPFDY | RASQSVGSSYL | GAFSRAT | QQYGSSPWT |
| AB18 | (SEQ ID NO: 19) | ADSVKG | (SEQ ID NO: 140) | A | (SEQ ID NO: 260) | (SEQ ID NO: 312) |
| | | (SEQ ID NO: 77) | | (SEQ ID NO: 202) | | |
| HSV- | DYVIH | YINPYDDDTTY | RGNSYDGYFDY | RASQNVGTAVA | SASNRYT | QQYTNYPMYT |
| AB19 | (SEQ ID NO: 20) | NQKFKG | SMDY | (SEQ ID NO: 203) | (SEQ ID NO: 261) | (SEQ ID NO: 313) |
| | | (SEQ ID NO: 78) | (SEQ ID NO: 141) | | | |
| HSV- | DSWIH | WISPYGGSTYY | RHWPGGFDY | RASQDVSTAVA | SASFLYS | QQYLYHPAT |
| AB20 | (SEQ ID NO: 21) | ADSVKG | (SEQ ID NO: 142) | (SEQ ID NO: 204) | (SEQ ID NO: 258) | (SEQ ID NO: 314) |
| | | (SEQ ID NO: 79) | | | | |
| HSV- | RYWMS | NIKQDGSEKYY | EGGWFGELAFD | RASQRVSSSYL | DASSRAT | QQYGSLPWT |
| AB21 | (SEQ ID NO: 22) | VDSVKG | Y | A | (SEQ ID NO: 262) | (SEQ ID NO: 315) |
| | | (SEQ ID NO: 80) | (SEQ ID NO: 143) | (SEQ ID NO: 205) | | |
| HSV- | NSGMH | VIWYDGSKRYY | NDDY | RASQSVSSYLA | DASNRAT | QQSSNWPRT |
| AB22 | (SEQ ID NO: 23) | ADSVKG | (SEQ ID NO: 144) | (SEQ ID NO: 206) | (SEQ ID NO: 257) | (SEQ ID NO: 316) |
| | | (SEQ ID NO: 81) | | | | |
| HSV- | NYYMY | GINPSNGGTISF | RDYRFDMGFD | RASKGVSTSGY | LASYLES | QHSRDLPLT |
| AB23 | (SEQ ID NO: 24) | NEKFKN | Y | SYLH | (SEQ ID NO: 263) | (SEQ ID NO: 317) |
| | | (SEQ ID NO: 82) | (SEQ ID NO: 145) | (SEQ ID NO: 207) | | |
| HSV- | VYGMN | IIWYDGDNQYY | DLRTGPFDY | RASQSIGSSLH | YASQSFS | HQSSSLPFT |
| AB24 | (SEQ ID NO: 25) | ADSVKG | (SEQ ID NO: 146) | (SEQ ID NO: 208) | (SEQ ID NO: 264) | (SEQ ID NO: 318) |
| | | (SEQ ID NO: 83) | | | | |
| HSV- | SYNMH | AIYPGNGDTSY | VVYYSNSYWY | RASSSVSYMH | APSNLAS | QQWSFNPPT |
| AB25 | (SEQ ID NO: 2) | NQKFKG | FDV | (SEQ ID NO: 209) | (SEQ ID NO: 265) | (SEQ ID NO: 319) |
| | | (SEQ ID NO: 61) | (SEQ ID NO: 147) | | | |
| HSV- | DYAMH | TISWNSGSIGYA | DIQYGNYYYG | RASQSVSSYLA | DASNRAT | QQRSNWPIT |
| AB26 | (SEQ ID NO: 1) | DSVKG | MDV | (SEQ ID NO: 206) | (SEQ ID NO: 257) | (SEQ ID NO: 320) |
| | | (SEQ ID NO: 84) | (SEQ ID NO: 148) | | | |
| HSV- | SYNMH | GIYPGNGDTSY | YDYNYAMDY | RASSSVSYMH | ATSNLAS | QQWTFNPPT |
| AB27 | (SEQ ID NO: 2) | NQKFKG | (SEQ ID NO: 149) | (SEQ ID NO: 209) | (SEQ ID NO: 244) | (SEQ ID NO: 321) |
| | | (SEQ ID NO: 85) | | | | |
| HSV- | DFYMN | FIRDKAKGYTT | EGHTAAPFDY | KASQNIDKYLN | NTNNLQT | LQHISRPRT |
| AB28 | (SEQ ID NO: 26) | EYNPSVKG | (SEQ ID NO: 150) | (SEQ ID NO: 210) | (SEQ ID NO: 266) | (SEQ ID NO: 322) |
| | | (SEQ ID NO: 86) | | | | |
| HSV- | AYEMK | VIGPSGGFTFYA | EGDNDAFDI | RASQSVSSYLA | DASNRAT | QQRSNWPMYT |
| AB29 | (SEQ ID NO: 27) | DSVKG | (SEQ ID NO: 151) | (SEQ ID NO: 206) | (SEQ ID NO: 257) | (SEQ ID NO: 323) |
| | | (SEQ ID NO: 87) | | | | |
| HSV- | DTYIH | RIDPANGYTKY | EGYYGNYGVY | KTSQDINKYMA | YTSALQP | LQYDNLWT |
| AB30 | (SEQ ID NO: 28) | DPKFQG | AMDY | (SEQ ID NO: 211) | (SEQ ID NO: 267) | (SEQ ID NO: 324) |
| | | (SEQ ID NO: 88) | (SEQ ID NO: 152) | | | |
| HSV- | NYWIQ | EILPGSGSTEYT | YFFGSSPNWYF | GASENIYGALN | GATNLAD | QNVLNTPLT |
| AB31 | (SEQ ID NO: 29) | ENFKD | DV | (SEQ ID NO: 212) | (SEQ ID NO: 268) | (SEQ ID NO: 325) |
| | | (SEQ ID NO: 89) | (SEQ ID NO: 153) | | | |
| HSV- | HDHAWS | FISYSGITNYNP | SLARTTAMDY | QASTDISSHLN | YGSHLLS | GQGNRLPYT |
| AB32 | (SEQ ID NO: 30) | SLQG | (SEQ ID NO: 135) | (SEQ ID NO: 213) | (SEQ ID NO: 269) | (SEQ ID NO: 326) |
| | | (SEQ ID NO: 90) | | | | |
| HSV- | NYWIA | IIYPGDSDIRYSP | HDIEGFDY | RASQSVSSSFFA | GASSRAT | QQYDSSAIT |
| AB33 | (SEQ ID NO: 31) | SFQG | (SEQ ID NO: 154) | (SEQ ID NO: 214) | (SEQ ID NO: 247) | (SEQ ID NO: 327) |
| | | (SEQ ID NO: 91) | | | | |
| HSV- | NNAIN | GIIPMFGTAKYS | SRDLLLFPHHA | QGDSLRSYYAS | GKNNRPS | SSRDSSGNHWV |
| AB34 | (SEQ ID NO: 32) | QNFQG | LSP | (SEQ ID NO: 215) | (SEQ ID NO: 270) | (SEQ ID NO: 328) |
| | | (SEQ ID NO: 92) | (SEQ ID NO: 155) | | | |
| HSV- | RYWMH | AIYPGNSDTSY | DYGYYFDF | SASSSRSYMQ | DTSKLAS | HQRSSYT |
| AB35 | (SEQ ID NO: 33) | NQKFEG | (SEQ ID NO: 156) | (SEQ ID NO: 216) | (SEQ ID NO: 271) | (SEQ ID NO: 329) |
| | | (SEQ ID NO: 93) | | | | |
| HSV- | SYRMH | YINPSTGYTEYN | GGGVFDY | SASSSISYMH | TTSNLAS | HQRSTYPLT |
| AB36 | (SEQ ID NO: 34) | QKFKD | (SEQ ID NO: 157) | (SEQ ID NO: 217) | (SEQ ID NO: 272) | (SEQ ID NO: 330) |
| | | (SEQ ID NO: 94) | | | | |
| HSV- | DYAMT | SISGSGGNTYY | DRLSITIRPRYY | RSSQSLLYSIGY | LGSNRAS | MQALQTPYT |
| AB37 | (SEQ ID NO: 35) | ADSVKG | GLDV | NYLD | (SEQ ID NO: 273) | (SEQ ID NO: 331) |
| | | (SEQ ID NO: 95) | (SEQ ID NO: 158) | (SEQ ID NO: 218) | | |
| HSV- | NYAMN | TISGSGGTTNYA | DSNWGNFDL | KSSQSVLYRSN | WASTRES | QQYYTTPYT |
| AB38 | (SEQ ID NO: 36) | DSVKG | (SEQ ID NO: 159) | NRNFLG | (SEQ ID NO: 274) | (SEQ ID NO: 332) |
| | | (SEQ ID NO: 96) | | (SEQ ID NO: 219) | | |
| HSV- | DYWMQ | TIYPGDGDTGY | GDYYGSNSLDY | KASQDVSTVVA | SASYRYI | QQHYSPPYT |
| AB39 | (SEQ ID NO: 37) | AQKFQG | (SEQ ID NO: 160) | (SEQ ID NO: 220) | (SEQ ID NO: 275) | (SEQ ID NO: 333) |
| | | (SEQ ID NO: 97) | | | | |
| HSV- | NFGMT | GISGGGRDTYF | WGNIYFDY | RASLSINTFLN | AASSLHG | QQSSNTPFT |
| AB40 | (SEQ ID NO: 38) | ADSVKG | (SEQ ID NO: 161) | (SEQ ID NO: 221) | (SEQ ID NO: 276) | (SEQ ID NO: 334) |
| | | (SEQ ID NO: 98) | | | | |
| HSV- | SYDMS | YISSGGGITYFP | HYFGSSGPFAY | RASENIFSYLA | NTKTLAE | QHHYGTPFT |
| AB41 | (SEQ ID NO: 39) | DTVQG | (SEQ ID NO: 162) | (SEQ ID NO: 222) | (SEQ ID NO: 277) | (SEQ ID NO: 335) |
| | | (SEQ ID NO: 99) | | | | |
| HSV- | SNVIS | GVIPIVDIANYA | TLGLVLDAMD | RASQSLGSSYL | GASSRAP | QQYADSPIT |
| AB42 | (SEQ D NO: 40) | QRFKG | Y | A | (SEQ ID NO: 278) | (SEQ ID NO: 336) |
| | | (SEQ ID NO: 100) | (SEQ ID NO: 163) | (SEQ ID NO: 223) | | |
| HSV- | DSSIN | MIWGDGRIDYA | DGYFPYAMDF | RASESVDSYGQ | LASNLES | QQNAEDSRT |
| AB43 | (SEQ ID NO: 41) | DALKS | (SEQ ID NO: 164) | SYMH | (SEQ ID NO: 279) | (SEQ ID NO: 337) |
| | | (SEQ ID NO: 101) | | (SEQ ID NO: 224) | | |
| HSV- | SYWIH | MIDPSDGETRL | LKEYGNYDSFY | HASQNIDVWLS | KASNLHT | QQAHSYPFT |
| AB44 | (SEQ ID NO: 42) | NQRFQG | FDV | (SEQ ID NO: 225) | (SEQ ID NO: 280) | (SEQ ID NO: 338) |
| | | (SEQ ID NO: 102) | (SEQ ID NO: 165) | | | |
| HSV- | SYNMH | YIYPGNGATNY | GDSVPFAY | SAHSSVSFMH | STSSLAS | QQRSSFPLT |
| AB45 | (SEQ ID NO: 2) | NQKFQG | (SEQ ID NO: 166) | (SEQ ID NO: 226) | (SEQ ID NO: 281) | (SEQ ID NO: 339) |
| | | (SEQ ID NO: 103) | | | | |
| HSV- | SYNMH | YIYPGNGATNY | GDSVPFAY | SAHSSVSFMH | STSSLAS | QQRSSFPLT |
| AB46 | (SEQ ID NO: 2) | NQKFQG | (SEQ ID NO: 166) | (SEQ ID NO: 226) | (SEQ ID NO: 281) | (SEQ ID NO: 339) |
| | | (SEQ ID NO: 103) | | | | |
| HSV- | SYGMH | IIWYDGSNKYY | VATSGDFDYYG | RASQRISTYLA | DASKRAT | QQRSNWPLT |
| AB47 | (SEQ ID NO: 43) | ADSVKG | MDV | (SEQ ID NO: 227) | (SEQ ID NO: 282) | (SEQ ID NO: 340) |
| | | (SEQ ID NO: 104) | (SEQ ID NO: 167) | | | |
| HSV- | DYGMT | GIHWHGKRTGY | GGMSTGDWFD | RASQSINSYLN | VASSLQS | QQSYSTPPIT |
| AB48 | (SEQ ID NO: 44) | ADSVKG | P | (SEQ ID NO: 228) | (SEQ ID NO: 283) | (SEQ ID NO: 341) |
| | | (SEQ ID NO: 105) | (SEQ ID NO: 168) | | | |
| HSV- | NYAMS | TISSGGSHTYYL | LFTGYAMDY | TASSSVSSSYLH | STSNLAS | HQYYRLPPIT |
| AB49 | (SEQ ID NO: 45) | DSVKG | (SEQ ID NO: 169) | (SEQ ID NO: 229) | (SEQ ID NO: 284) | (SEQ ID NO: 342) |
| | | (SEQ ID NO: 106) | | | | |
| HSV- | RSAMN | GISGSGGRTYY | DSYTTSWYGG | RASQGIFSWLA | AASSLQS | QQANSVPIT |
| AB50 | (SEQ ID NO: 46) | ADSVKG | MDV | (SEQ ID NO: 230) | (SEQ ID NO: 246) | (SEQ ID NO: 343) |
| | | (SEQ ID NO: 107) | (SEQ ID NO: 170) | | | |
| HSV- | NYNIH | AIYPGNGDAPY | ANWDVAFAY | KASQDIDRYMA | DTSTLQS | LQYDNLWT |
| AB51 | (SEQ ID NO: 47) | SQKFQG | (SEQ ID NO: 171) | (SEQ ID NO: 231) | (SEQ ID NO: 285) | (SEQ ID NO: 324) |
| | | (SEQ ID NO: 108) | | | | |
| HSV- | DYAMN | AISGDGGSTYY | DLRNTIFGVVIP | RASQSIRSWLA | KASSLES | QQYNSYSYT |
| AB52 | (SEQ ID NO: 48) | ADSVKG | DAFDI | (SEQ ID NO: 232) | (SEQ ID NO: 286) | (SEQ ID NO: 344) |
| | | (SEQ ID NO: 109) | (SEQ ID NO: 172) | | | |
| HSV- | ELSIH | GFDPEDGETIYA | IFGVVTNFDN | RASQAIRNDLG | AAFNLQS | QQYNRYPWT |
| AB53 | (SEQ ID NO: 14) | QKFQG | (SEQ ID NO: 173) | (SEQ ID NO: 233) | (SEQ ID NO: 287) | (SEQ ID NO: 345) |
| | | (SEQ ID NO: 110) | | | | |
| HSV- | SHFWS | YILYTGGTSFNP | ARSGITFTGIIVP | RASQSVSSSYL | GASSRAT | QQYGSSPWT |
| AB54 | (SEQ ID NO: 49) | SLKS | GSFDI | A | (SEQ ID NO: 247) | (SEQ ID NO: 312) |
| | | (SEQ ID NO: 111) | (SEQ ID NO: 174) | (SEQ ID NO: 190) | | |
| HSV- | SDAMY | VIYYDGNYQYY | LNWDYWYLDL | RASQSISSYLN | AASSLQS | QQSYSTPPIT |
| AB55 | (SEQ ID NO: 50) | EDSVKG | (SEQ ID NO: 175) | (SEQ ID NO: 234) | (SEQ ID NO: 246) | (SEQ ID NO: 341) |
| | | (SEQ ID NO: 112) | | | | |
| HSV- | DYTMH | GISWNSGSIGYA | DNSGYGHYYY | RASQSVSSNLA | GASTRAT | QHYINWPLT |
| AB56 | (SEQ ID NO: 51) | DSVKG | GMDV | (SEQ ID NO: 192) | (SEQ ID NO: 288) | (SEQ ID NO: 346) |
| | | (SEQ ID NO: 113) | (SEQ ID NO: 176) | | | |
| HSV- | DYAMH | VISWNSDSIGYA | DNHYGSGSYYY | RASQSVSSNLA | GASTRAT | QHYINWPLT |
| AB57 | (SEQ ID NO: 1) | DSVKG | YQYGMDV | (SEQ ID NO: 192) | (SEQ ID NO: 288) | (SEQ ID NO: 346) |
| | | (SEQ ID NO: 114) | (SEQ ID NO: 177) | | | |
| HSV- | NYNIN | LISGSSSYIYYA | RTLSYYVMDV | RASQGISNYLA | AASTLQS | QKYNSAPYT |
| AB58 | (SEQ ID NO: 52) | DSVKG | (SEQ ID NO: 178) | (SEQ ID NO: 235) | (SEQ ID NO: 243) | (SEQ ID NO: 347) |
| | | (SEQ ID NO: 115) | | | | |
| HSV- | SSYWT | YIYYSGSSNYNP | EGNVDTTMIFD | RASQGIRNDLG | AASSLQS | LQDFNYPWT |
| AB59 | (SEQ ID NO: 53) | SLKS | Y | (SEQ ID NO: 236) | (SEQ ID NO: 246) | (SEQ ID NO: 348) |
| | | (SEQ ID NO: 116) | (SEQ ID NO: 179) | | | |
| HSV- | SFGMH | VISFDGSIKYSV | DRLNYYDSSGY | SGSSSNIGNNYV | DNNKRPS | GTWDSRLSAVV |
| AB60 | (SEQ ID NO: 18) | DSVKG | YHYKYYGMAV | S | (SEQ ID NO: 289) | (SEQ ID NO: 349) |
| | | (SEQ ID NO: 117) | (SEQ ID NO: 180) | (SEQ ID NO: 237) | | |
| HSV- | SSYIN | TINPVSGSTSYA | TGTSSDVGSYN | YVN | GVSKRPS | GTFAGGSYYGV |
| AB61 | (SEQ ID NO: 55) | QKFQG | GGWFDY | (SEQ ID NO: 238) | (SEQ ID NO: 290) | (SEQ ID NO: 350) |
| | | (SEQ ID NO: 118) | (SEQ ID NO: 181) | | | |
| HSV- | HYGMN | WINTYTGEPTY | YPYYYGTSHW | SASQDISNYLN | FTSSLHS | QQYSTVPWT |
| AB62 | (SEQ ID NO: 56) | AADFKR | YFDV | (SEQ ID NO: 188) | (SEQ ID NO: 245) | (SEQ ID NO: 297) |
| | | (SEQ ID NO: 62) | (SEQ ID NO: 182) | | | |
| HSV- | WYWLE | EIDPGTFITNYN | FSHFSGSNYDY | RASQSIGTNIH | YASESIS | QQSWSWPTT |
| AB63 | (SEQ ID NO: 57) | EKFKA | FDY | (SEQ ID NO: 240) | (SEQ ID NO: 292) | (SEQ ID NO: 352) |
| | | (SEQ ID NO: 120) | (SEQ ID NO: 183) | | | |
| HSV- | SGYSWN | SITYDGSTNYA | GSHYFGHWHF | RASQSVDYDGD | AASYLES | QQSHEDPYT |
| AB64 | (SEQ ID NO: 58) | DSVKG | AV | SYMN | (SEQ ID NO: 293) | (SEQ ID NO: 353) |
| | | (SEQ ID NO: 121) | (SEQ ID NO: 184) | (SEQ ID NO: 241) | | |
| HSV- | SYGMH | VISYEESNRYH | DGGIAAPGPDY | RSSQSLLYSNG | LGSNRAS | MQARQTPFT |
| AB65 | (SEQ ID NO: 43) | ADSVKG | YNYLD | (SEQ ID NO: 242) | (SEQ ID NO: 273) | (SEQ ID NO: 354) |
| | | (SEQ ID NO: 122) | (SEQ ID NO: 185) | | | |
| HSV- | DYNIH | YIYPNNGDNGY | GRLRYFDV | RASESVDNYGH | LASNLES | QQYNEDPPT |
| AB66 | (SEQ ID NO: 54) | NQKFRG | (SEQ ID NO: 607) | SFMH | (SEQ ID NO: 279) | (SEQ ID NO: 351) |
| | | (SEQ ID NO: 119) | | (SEQ ID NO: 239) | | |
| HSV- | SYWMS | NIKQDGSEKYY | DRGSLYY | RPSQGINWELA | DASSLEQ | QQFNSYPLT |
| AB67 | (SEQ ID NO: 59) | VDSVKG | (SEQ ID NO: 608) | (SEQ ID NO: 610) | (SEQ ID NO: 291) | (SEQ ID NO: 612) |
| | | (SEQ ID NO: 80) | | | | |
| HSV- | SYAMS | GIIPIFGTVNYA | RRGAKFDY | SGSTSNIGSHYV | RNHQRPS | AVWDDTLSGW |
| AB68 | (SEQ ID NO: 605) | QKFQG | (SEQ ID NO: 609) | V | (SEQ ID NO: 294) | V |
| | | (SEQ ID NO: 606) | | (SEQ ID NO: 611) | | (SEQ ID NO: 613) |

[0119] In some embodiments, one or more polynucleotides of the present disclosure encode an antibody comprising a heavy chain variable region comprising: an HVR-H1 comprising the sequence of SEQ ID NO: 1; an HVR-H2 comprising the sequence of SEQ ID NO: 60; and an HVR-H3 comprising the sequence of SEQ ID NO: 123. In some embodiments, one or more polynucleotides of the present disclosure encode an antibody comprising a heavy chain variable region comprising: an HVR-H1 comprising the sequence of SEQ ID NO: 2; an HVR-H2 comprising the sequence of SEQ ID NO: 61; and an HVR-H3 comprising the sequence of SEQ ID NO: 124. In some embodiments, one or more polynucleotides of the present disclosure encode an antibody comprising a heavy chain variable region comprising: an HVR-H1 comprising the sequence of SEQ ID NO: 3; an HVR-H2 comprising the sequence of SEQ ID NO: 62; and an HVR-H3 comprising the sequence of SEQ ID NO: 125.

[0120] In some embodiments, one or more polynucleotides of the present disclosure encode an antibody comprising a light chain variable region comprising: an HVR-L1 comprising the sequence of SEQ ID NO: 186; an HVR-L2 comprising the sequence of SEQ ID NO: 243; and an HVR-L3 comprising the sequence of SEQ ID NO: 295. In some embodiments, one or more polynucleotides of the present disclosure encode an antibody comprising a light chain variable region comprising: an HVR-L1 comprising the sequence of SEQ ID NO: 187; an HVR-L2 comprising the sequence of SEQ ID NO: 244; and an HVR-L3 comprising the sequence of SEQ ID NO: 296. In some embodiments, one or more polynucleotides of the present disclosure encode an antibody comprising a light chain variable region comprising: an HVR-L1 comprising the sequence of SEQ ID NO: 188; an HVR-L2 comprising the sequence of SEQ ID NO: 245; and an HVR-L3 comprising the sequence of SEQ ID NO: 2297.

[0121] In some embodiments, one or more polynucleotides of the present disclosure encode an antibody comprising: an HVR-H1 comprising the sequence of SEQ ID NO: 1; an HVR-H2 comprising the sequence of SEQ ID NO: 60; an HVR-H3 comprising the sequence of SEQ ID NO: 123; an HVR-L1 comprising the sequence of SEQ ID NO: 186; an HVR-L2 comprising the sequence of SEQ ID NO: 243; and an HVR-L3 comprising the sequence of SEQ ID NO: 295. In some embodiments, one or more polynucleotides of the present disclosure encode an antibody comprising: an HVR-H1 comprising the sequence of SEQ ID NO: 2; an HVR-H2 comprising the sequence of SEQ ID NO: 61; an HVR-H3 comprising the sequence of SEQ ID NO: 124; an HVR-L1 comprising the sequence of SEQ ID NO: 187; an HVR-L2 comprising the sequence of SEQ ID NO: 244; and an HVR-L3 comprising the sequence of SEQ ID NO: 296. In some embodiments, one or more polynucleotides of the present disclosure encode an antibody comprising: an HVR-H1 comprising the sequence of SEQ ID NO: 3; an HVR-H2 comprising the sequence of SEQ ID NO: 62; an HVR-H3 comprising the sequence of SEQ ID NO: 125; an HVR-L1 comprising the sequence of SEQ ID NO: 188; an HVR-L2 comprising the sequence of SEQ ID NO: 245; and an HVR-L3 comprising the sequence of SEQ ID NO: 297.

[0122] In some embodiments, one or more polynucleotides of the present disclosure encode an antibody comprising a heavy chain variable region of any of the antibodies described herein or known in the art. In some embodiments, one or more polynucleotides of the present disclosure encode an antibody comprising a heavy chain variable region comprising a sequence having at least 75%, at least 80%, at least 85%, at least 86%, at least 87%, at least 88%, at least 89%, at least 90%, at least 91%, at least 92%, at least 93%, at least 94%, at least 95%, at least 96%, at least 97%, at least 98%, at least 99%, or 100% sequence identity to a sequence selected from SEQ ID NOS: 355-419 or 614-865. In some embodiments, one or more polynucleotides of the present disclosure encode an antibody comprising a heavy chain variable region comprising a sequence selected from SEQ ID NOS: 355-419 or 614-865. In some embodiments, one or more polynucleotides of the present disclosure encode an antibody comprising the heavy chain variable region of any of the antibodies depicted in Table 2.

[0123] In some embodiments, one or more polynucleotides of the present disclosure encode an antibody comprising a light chain variable region of any of the antibodies described herein or known in the art. In some embodiments one or more polynucleotides of the present disclosure encode an antibody comprising a light chain variable region comprising a sequence having at least 75%, at least 80%, at least 85%, at least 86%, at least 87%, at least 88%, at least 89%, at least 90%, at least 91%, at least 92%, at least 93%, at least 94%, at least 95%, at least 96%, at least 97%, at least 98%, at least 99%, or 100% sequence identity to a sequence selected from SEQ ID NOS: 420-482 or 866-1116. In some embodiments, one or more polynucleotides of the present disclosure encode an antibody comprising a light chain variable region comprising a sequence selected from SEQ ID NOS: 420-482 or 866-1116. In some embodiments, one or more polynucleotides of the present disclosure encode an antibody comprising the light chain variable region of any of the antibodies depicted in Table 2.

[0124] In some embodiments, one or more polynucleotides of the present disclosure encode an antibody comprising a heavy chain variable region and a light chain variable region of any of the antibodies described herein or known in the art. In some embodiments, one or more polynucleotides of the present disclosure encode an antibody comprising: a heavy chain variable region comprising a sequence having at least 75%, at least 80%, at least 85%, at least 86%, at least 87%, at least 88%, at least 89%, at least 90%, at least 91%, at least 92%, at least 93%, at least 94%, at least 95%, at least 96%, at least 97%, at least 98%, at least 99%, or 100% sequence identity to a sequence selected from SEQ ID NOS: 355-419 or 614-865; and a light chain variable region comprising a sequence having at least 75%, at least 80%, at least 85%, at least 86%, at least 87%, at least 88%, at least 89%, at least 90%, at least 91%, at least 92%, at least 93%, at least 94%, at least 95%, at least 96%, at least 97%, at least 98%, at least 99%, or 100% sequence identity to a sequence selected from SEQ ID NOS: 420-482 or 866-1116. In some embodiments, one or more polynucleotides of the present disclosure encode an antibody comprising a heavy chain variable region comprising a sequence selected from SEQ ID NOS: 355-419 or 614-865, and a light chain variable region comprising a sequence selected from SEQ ID NOS: 420-482 or 866-1116. In some embodiments, one or more polynucleotides of the present disclosure encode an antibody comprising a heavy chain variable region and a light chain variable region each independently having at least 75%, at least 80%, at least 85%, at least 86%, at least 87%, at least 88%, at least 89%, at least 90%, at least 91%, at least 92%, at least 93%, at least 94%, at least 95%, at least 96%, at least 97%, at least 98%, at least 99%, or 100% sequence identity to the heavy and light chain variable regions of any of the antibodies depicted in Table 2. In some embodiments, one or more polynucleotides of the present disclosure encode an antibody comprising the heavy chain variable region and the light chain variable region of any of the antibodies depicted in Table 2.

TABLE 2
Heavy and light chain variable regions of exemplary antibodies

| AB | | |
|---|---|---|
| Name: | VH: | VL: |
| HSV- | EVQLVESGGGLVQPGRSLRLSCAASGFTFDDYAMHWVRQAPG | DIQMTQSPSSLSASVGDRVTITCRASQGIRNYLA |
| AB1 | KGLEWVSAITWNSGHIDYADSVEGRFTISRDNAKNSLYLQMNS | WYQQKPGKAPKLLIYAASTLQSGVPSRFSGSGSG |
| | LRAEDTAVYYCAKVSYLSTASSLDYWGQGTLVTVSS (SEQ ID | TDFTLTISSLQPEDVATYYCQRYNRAPYTEGQGT |
| | NO: 355) | KVEIK (SEQ ID NO: 420) |
| HSV- | QVQLQQPGAELVKPGASVKMSCKASGYTFTSYNMHWVKQTPG | QIVLSQSPAILSASPGEKVTMTCRASSSVSYIHWF |
| AB2 | RGLEWIGAIYPGNGDTSYNQKFKGKATLTADKSSSTAYMQLSSL | QQKPGSSPKPWIYATSNLASGVPVRFSGSGSGTS |
| | TSEDSAVYYCARSTYYGGDWYFNVWGAGTTVTVSA (SEQ ID | YSLTISRVEAEDAATYYCQQWTSNPPTFGGGTK |
| | NO: 356) | LEIK (SEQ ID NO: 421) |
| HSV- | EVQLVESGGGLVQPGGSLRLSCAASGYTFTNYGMNWVRQAPG | DIQMTQSPSSLSASVGDRVTITCSASQDISNYLN |
| AB3 | KGLEWVGWINTYTGEPTYAADFKRRFTFSLDTSKSTAYLQMNS | WYQQKPGKAPKVLIYFTSSLHSGVPSRFSGSGSG |
| | LRAEDTAVYYCAKYPHYYGSSHWYFDVWGQGTLVTVSS (SEQ | TDFTLTISSLQPEDFATYYCQQYSTVPWTFGQGT |
| | ID NO: 357) | KVEIK (SEQ ID NO: 422) |
| HSV- | EVQLVQSGAEVKKPGESLKISCKGSGYSFITYWLGWVRQMPGK | DIQMTQSPSSLSASVGDRVTITCRASQGISSWLA |
| AB4 | GLDWIGIMSPVDSDIRYSPSFQGQVTMSVDKSITTAYLQWNSLK | WYQQKPEKAPKSLIYAASSLQSGVPSRFSGSGSG |
| | ASDTAMYYCARRRPGQGYFDFWGQGTLVTVSS (SEQ ID NO: | TDFTLTISSLQPEDFATYYCQQYNIYPYTFGQGT |
| | 358) | KLEIK (SEQ ID NO: 423) |
| HSV- | EVQLVESGGGLVQPGGSLRLSCAASGFTESNYWMNWVRQAPG | EIVLTQSPGTLSLSPGERATLSCRASQSVSSSYLA |
| ABS | KGLEWVAAINQDGSEKYYVGSVKGRFTISRDNAKNSLYLQMNS | WYQQKPGQAPRLLIYGASSRATGIPDRFSGSGSG |
| | LRVEDTAVYYCVRDYYDILTDYYIHYWYFDLWGRGTLVTVSS | TDFTLTISRLEPEDFAVYYCQQYGSSPCTFGQGT |
| | (SEQ ID NO: 359) | RLEIK (SEQ ID NO: 424) |
| HSV- | QVQLVQSGAEVKKPGSSVKVSCKASGYSFTDYHIHWVRQAPGQ | DIVMTQTPLSLSVTPGQPASISCRSSRSLVHSRGN |
| AB6 | GLEWMGVINPMYGTTDYNQRFKGRVTITADESTSTAYMELSSL | TYLHWYLQKPGQSPQLLIYKVSNRFIGVPDRFSG |
| | RSEDTAVYYCARYDYFTGTGVYWGQGTLVTVSS (SEQ ID NO: | SGSGTDFTLKISRVEAEDVGVYYCSQSTHLPFTF |
| | 360) | GQGTKLEIK (SEQ ID NO: 425) |
| HSV- | QVQLVQSGAEVKKPGASVKVSCKASGYTFTRYGISWVRQAPGQ | EIVMTQSPATLSVSPGERATLSCRASQSVSSNLA |
| AB7 | GLEWMGWISTYSGNTNYAQKLQGRVTMTTDTSTSTAYMELRS | WFQQKPGQAPRPLIYDASTRATGVPARFSGSGSG |
| | LRSDDTAVYYCARRQLYFDYWGQGTLVTVSS | TDFTLTISSLQSEDFAVYYCQQYDNWPLTEGGGT |
| | (SEQ ID NO: 361) | KVEIK (SEQ ID NO: 426) |
| HSV- | EVQLVQSGAEVKKPGESLKISCKGSGYSFSNYWIGWVRQMPGK | QSVLTQPPSVSGAPGQRVTISCTGSSSNIGSGYDV |
| AB8 | GLEWMGIIDPSNSYTRYSPSFQGQVTISADKSISTAYLQWSSLKA | HWYQQLPGTAPKLLIYGNSKRPSGVPDRFSGSKS |
| | SDTAMYYCARWYYKPFDVWGQGTLVTVSS (SEQ ID NO: 362) | GTSASLAITGLQSEDEADYYCASWTDGLSLVVF |
| | | GGGTKLTVL (SEQ ID NO: 427) |
| HSV- | QVQLVQSGAEVKKPGSSVKVSCKASGYTFTDQTIHWMRQAPG | DIQMTQSPSSLSASVGDRVTITCKASRDVAIAVA |
| AB9 | QGLEWIGYIYPRDDSPKYNENFKGKVTITADKSTSTAYMELSSL | WYQQKPGKVPKLLIYWASTRHTGVPSRFSGSGS |
| | RSEDTAVYYCAIPDRSGYAWFIYWGQGTLVTVSS (SEQ ID NO: | RTDFTLTISSLQPEDVADYFCHQYSSYPFTEGSGT |
| | 363) | KLEIK (SEQ ID NO: 428) |
| HSV- | QVQLVQSGAEVKKPGASVKVSCKASGYIFITYWMTWVRQAPG | DIQMTQSPSSLSASVGDRVTITCRTSENIYSYLAW |
| AB10 | QGLEWMGQIFPASGSADYNEKFEGRVTMTTDTSTSTAYMELRS | YQQKPGKAPKLLIYNAKTLAEGVPSRFSGSGSGT |
| | LRSDDTAVYYCARGGGGFAYWGQGTLVTVSS (SEQ ID NO: | DFTLTISSLQPEDFATYYCQHHYGIPFTEGQGTKV |
| | 364) | EIK (SEQ ID NO: 429) |
| HSV- | EVKLEESGGGLVQPGGSMKLSCVASGFIFSNHWMNWVRQSPEK | DILLTQSPAILSVSPGERVSFSCRASQFVGSSIHW |
| AB11 | GLEWVAEIRSKSINSATHYAESVKGRFTISRDDSKSAVYLQMTD | YQQRTNGSPRLLIKYASESMSGIPSRFSGSGSGTD |
| | LRTEDTGVYYCSRNYYGSTYDYWGQGTTLTVSS (SEQ ID NO: | FTLSINTVESEDIADYYCQQSHSWPFTFGSGTNLE |
| | 365) | VK (SEQ ID NO: 430) |
| HSV- | QVQLVQSGAEVKKPGASVKVSCKVSGYTLTELSIHWVRQAPGK | QSVLTQPPSVSGAPGQRVTISCTGSGSNIGAPYD |
| AB12 | GLEWMGGFDPEENEIVYAQRFQGRVTMTEDTSTDTAYMELSSL | VSWYQQLPGTAPKLLIYHNNKRPSGVPDRFSGS |
| | RSEDTAVYYCAIVGSFSPLTLGLWGQGTMVTVSS (SEQ ID NO: | KSGTSASLAITGLQAEDEADYYCATVEAGLSGS |
| | 366) | VFOGGTKLTVL (SEQ ID NO: 431) |
| HSV- | EVQLQESGPGLVRPSQTLSLTCTVSGYSITSDHAWSWVRQPPGR | DIQMTQSPSSLSASVGDRVTITCRASQDISSYLN |
| AB13 | GLEWIGYISYSGITTYNPSLKSRVTMLRDTSKNQFSLRLSSVTAA | WYQQKPGKAPKLLTYYTSRLHSGVPSRFSGSGS |
| | DTAVYYCARSLARTTAMDYWGQGSLVTVSS | GTDFTFTISSLQPEDIATYYCQQGNTLPYTEGQGT |
| | (SEQ ID NO: 367) | KVEIK (SEQ ID NO: 432) |
| HSV- | EVQLVESGGGLVQPGRSLRLSCAASRFTFDDYAMHWVRQAPG | DIQMTQSPSSVSASVGDRVTITCRASQGISSWLA |
| AB14 | KGLEWVSGISWNSGRIGYADSVKGRFTISRDNAENSLFLQMNGL | WYQQKPGKAPKWYGASSLESGVPSRFSGSGSG |
| | RAEDTALYYCAKGRDSFDIWGQGTMVTVSS (SEQ ID NO: | TDFTLTISSLQPEDFASYYCQQANSFPYTEGQGT |
| | 368) | KLEIK (SEQ ID NO: 433) |
| HSV- | QVQLVESGGGVVQPGRSLRLSCAASGFIFSSYAMHWVRQAPGN | EIVLTQSPATLSLSPGERATLSCRASQSVYSYLA |
| AB15 | GLEWVAFMSYDGSNKKYADSVKGRFTISRDNSKNTLYLQMNSL | WYQQKPGQAPRLLIYDASNRATGIPARFSGSGSG |
| | RAEDTAVYYCARDRGIAAGGNYYYYGMDVWGQGTTVTVSS | TDFTLTISSLEPEDFAVYYCQQRSNWPPFTEGPGT |
| | (SEQ ID NO: 369) | KVDIK (SEQ ID NO: 434) |
| HSV- | EVQLVESGGGLVQPGGSLRLSCAASGYVFTDYGMNWVRQAPG | DIQMTQSPSSLSASVGDRVTITCKASQNVGTNVA |
| AB16 | KGLEWMGWINTYIGEPIYADSVKGRFTFSLDTSKSTAYLQMNSL | WYQQKPGKAPKALIYSASFLYSGVPYRFSGSGS |
| | RAEDTAVYYCARGYRSYAMDYWGQGTLVTVSS (SEQ ID NO: | GTDFTLTISSLQPEDFATYYCQQYNIYPLTFGQGT |
| | 370) | KVEIK (SEQ ID NO: 435) |
| HSV- | EVQLVESGGGLVQPGGSLRLSCAASGFTFSSFGMHWVRQAPGK | DIQLTQSPSFESASVGDRVTITCKASQNVDTNVA |
| AB17 | GLEWVAYISSDSSAIYYADTVKGRFTISRDNAKNSLYLQMNSLR | WYQQKPGKAPKALIYSASYRYSGVPSRFSGSGS |
| | DEDTAVYYCGRGRENIYYGSRLDYWGQGTTVTVSS (SEQ ID | GTDFTLTISSLQPEDFATYYCQQYNNYPFTFGQG |
| | NO: 371) | TKLEIK (SEQ ID NO: 436) |
| HSV- | QVQLVESGGGVVQPGRSLRLSCAASGFTESSYTMHWVRQAPGK | EIVLTQSPGTLSLSPGERATLSCRASQSVGSSYLA |
| AB18 | GLEWVTFISYDGNNKYYADSVKGRFTISRDNSKNTLYLQMNSL | WYQQKPGQAPRLLIYGAFSRATGIPDRFSGSGSG |
| | RAEDTAIYYCARTGWLGPFDYWGQGTLVTVSS (SEQ ID NO: | TDFTLTISRLEPEDFAVYYCQQYGSSPWTFGQGT |
| | 372) | KVEIK (SEQ ID NO: 437) |
| HSV- | QVQLQESGPGLVRPSQTLSLTCTASGYTFTDYVIHWVKQPPGRG | DIQMTQSPSSLSASVGDRVTITCRASQNVGTAVA |
| AB19 | LEWIGYINPYDDDTTYNQKFKGRVTMLVDTSSNTAYLRLSSVT | WLQQTPGKAPKLLIYSASNRYTGVPSRFSGSGSG |
| | AEDTAVYYCARRGNSYDGYFDYSMDYWGSGTPVTVSS (SEQ | TDYTFTISSLQPEDIATYYCQQYTNYPMYTEGQG |
| | ID NO: 373) | TKVQIK (SEQ ID NO: 438) |
| HSV- | EVQLVESGGGLVQPGGSLRLSCAASGFTESDSWIHWVRQAPGK | DIQMTQSPSSLSASVGDRVTITCRASQDVSTAVA |
| AB20 | GLEWVAWISPYGGSTYYADSVKGRFTISADTSKNTAYLQMNSL | WYQQKPGKAPKWYSASFLYSGVPSRFSGSGSG |
| | RAEDTAVYYCARRHWPGGFDYWGQGTLVTVSS (SEQ ID NO: | TDFTLTISSLQPEDFATYYCQQYLYHPATFGQGT |
| | 374) | KVEIK (SEQ ID NO: 439) |
| HSV- | EVQLVESGGGLVQPGGSLRLSCAASGFTESRYWMSWVRQAPGK | EIVLTQSPGTLSLSPGERATLSCRASQRVSSSYLA |
| AB21 | GLEWVANIKQDGSEKYYVDSVKGRFTISRDNAKNSLYLQMNSL | WYQQKPGQAPRLLIYDASSRATGIPDRFSGSGSG |
| | RAEDTAVYYCAREGGWFGELAFDYWGQGTLVTVSS (SEQ ID | TDFTLTISRLEPEDFAVYYCQQYGSLPWTFGQGT |
| | NO: 375) | KVEIK (SEQ ID NO: 440) |
| HSV- | QVQLVESGGGVVQPGRSLRLDCKASGITFSNSGMHWVRQAPGK | EIVLTQSPATLSLSPGERATLSCRASQSVSSYLAW |
| AB22 | GLEWVAVIWYDGSKRYVADSVKGRFTISRDNSKNTLFLQMNSL | YQQKPGQAPRLLIYDASNRATGIPARFSGSGSGT |
| | RAEDTAVYYCATNDDYWGQGTLVTVSS (SEQ ID NO: 376) | DFTLTISSLEPEDFAVYYCQQSSNWPRTFGQGTK |
| | | VEIK (SEQ ID NO: 441) |
| HSV- | QVQLVQSGVEVKKPGASVKVSCKASGYTFTNYYMYWVRQAPG | EIVLTQSPATLSLSPGERATLSCRASKGVSTSGYS |
| AB23 | QGLEWMGGINPSNGGTNFNEKFKNRVTLTTDSSTTTAYMELKS | YLHWYQQKPGQAPRLLIYLASYLESGVPARFSG |
| | LQFDDTAVYYCARRDYRFDMGFDYWGQGTTVTVSS (SEQ ID | SGSGTDFTLTISSLEPEDFAVYYCQHSRDLPLTFG |
| | NO: 377) | GGTKVEIK (SEQ ID NO: 442) |
| HSV- | QVQLVESGGGVVQPGRSLRLSCAASGFTESVYGMNWVRQAPG | EIVLTQSPDFQSVTPKEKVTITCRASQSIGSSLHW |
| AB24 | KGLEWVAIIWYDGDNQYYADSVKGRFTISRDNSKNTLYLQMN | YQQKPDQSPKLLIKYASQSFSGVPSRFSGSGSGT |
| | GLRAEDTAVYYCARDLRTGPFDYWGQGTLVTVSS (SEQ ID NO: | DFTLTINSLEAEDAAAVYCHQSSSLPFTEGPGTK |
| | 378) | VDIK (SEQ ID NO: 443) |
| HSV- | EVQLVESGGGLVQPGGSLRLSCAASGYTFTSYNMHWVRQAPG | DIQMTQSPSSLSASVGDRVTITCRASSSVSYMHW |
| AB25 | KGLEWVGAIYPGNGDTSYNQKFKGRFTISVDKSKNTLYLQMNS | YQQKPGKAPKPLIYAPSNLASGVPSRFSGSGSGT |
| | LRAEDTAVYYCARVVYYSNSYWYFDVWGQGTLVTVSS (SEQ | DFTLTISSLQPEDFATYYCQQWSENPPTEGQGTK |
| | ID NO: 379) | VEIK (SEQ ID NO: 444) |
| HSV- | EVQLVESGGGLVQPGRSLRLSCAASGFTFNDYAMHWVRQAPG | EIVLTQSPATLSLSPGERATLSCRASQSVSSYLAW |
| AB26 | KGLEWVSTISWNSGSIGYADSVKGRFTISRDNAKKSLYLQMNSL | YQQKPGQAPRLLIYDASNRATGIPARFSGSGSGT |
| | RAEDTALYYCAKDIQYGNYYYGMDVWGQGTTVTVSS (SEQ ID | DFTLTISSLEPEDFAVYYCQQRSNWPITEGQGTRL |
| | NO: 380) | EIK (SEQ ID NO: 445) |
| HSV- | QAYLQQSGAELVRPGASVKMSCKASGYTFTSYNMHWVKQTPR | QIVLSQSPAILSASPGEKVTMTCRASSSVSYMHW |
| AB27 | QGLEWIGGIYPGNGDTSYNQKFKGKATLTVGKSSSTAYMQLSS | YQQKPGSSPKPWIYATSNLASGVPARFSGSGSGT |
| | LTSEDSAVYFCARYDYNYAMDYWGQGTSVTVSS (SEQ ID NO: | SYSFTISRVEAEDAATYYCQQWTFNPPTFGGGTR |
| | 381) | LEIK (SEQ ID NO: 446) |
| HSV- | QVQLQESGPGLVRPSQTLSLTCTVSGFTFTDFYMNWVRQPPGRG | DIQMTQSPSSLSASVGDRVTITCKASQNIDKYLN |
| AB28 | LEWIGFIRDKAKGYTTEYNPSVKGRVTMLVDTSKNQFSLRLSSV | WYQQKPGKAPKWYNTNNLQTGVPSRFSGSGS |
| | TAADTAVYYCAREGHTAAPFDYWGQGSLVTVSS (SEQ ID NO: | GTDFTFTISSLQPEDIATYYCLQHISRPRTFGQGT |
| | 382) | KVEIK (SEQ ID NO: 447) |
| HSV- | EVQLLESGGGLVQPGGSLRLSCAASGFTFSAYEMKWVRQAPGK | DIQMTQSPATLSLSPGERATLSCRASQSVSSYLA |
| AB29 | GLEWVSVIGPSGGFTFYADSVKGRFTISRDNSKNTLYLQMNSLR | WYQQKPGQAPRLLIYDASNRATGIPARFSGSGSG |
| | AEDTAVYYCATEGDNDAFDIWGQGTTVTVSS (SEQ ID | TDFTLTISSLEPEDFAVYYCQQRSNWPMYTEGQG |
| | NO: 383) | TKLEIK (SEQ ID NO: 448) |
| HSV- | QVQLVQSGAEVKKPGASVKVSCKASGFNIKDTYIHWVRQAPGQ | DIQMTQSPSSLSASVGDRVTITCKTSQDINKYMA |
| AB30 | RLEWMGRIDPANGYTKYDPKFQGRVTITADTSASTAYMELSSL | WYQQTPGKAPRLLIHYTSALQPGIPSRFSGSGSG |
| | RSEDTAVYYCAREGYYGNYGVYAMDYWGQGTLVTVSS (SEQ | RDYTFTISSLQPEDIATYYCLQYDNLWTFGQGTK |
| | ID NO: 384) | VEIK (SEQ ID NO: 449) |
| HSV- | QVQLVQSGAEVKKPGASVKVSCKASGYIFSNYWIQWVRQAPG | DIQMTQSPSSLSASVGDRVTITCGASENIYGALN |
| AB31 | QGLEWMGEILPGSGSTEYTENFKDRVTMTRDTSTSTVYMELSSL | WYQQKPGKAPKWYGATNLADGVPSRFSGSGS |
| | RSEDTAVYYCARYFFGSSPNWYFDVWGQGTLVTVSS (SEQ ID | GTDFTLTISSLQPEDFATYYCQNVLNTPLTFGQG |
| | NO: 385) | TKVEIK (SEQ ID NO: 450) |
| HSV- | QVQLQESGPGLVKPSETLSLTCAVSGHSISHDHAWSWVRQPPGE | DIQMTQSPSSLSASVGDSVTITCQASTDISSHLNW |
| AB32 | GLEWIGFISYSGITNYNPSLQGRVTISRDNSKNTLYLQMNSLRAE | YQQKPGKAPELLIYYGSHLLSGVPSRFSGSGSGT |
| | DTAVYYCARSLARTTAMDYWGEGTLVTVSS (SEQ ID | DFTFTISSLEAEDAATYYCGQGNRLPYTFGQGTK |
| | NO: 386) | VEIE (SEQ ID NO: 451) |
| HSV- | EVQLVQSGAEVKKPGESLKISCKGSGYIFTNYWIAWVRQMPGK | EIVLTQSPGTLSLSPGERATLSCRASQSVSSSFFA |
| AB33 | GLESMGIIYPGDSDIRYSPSFQGQVTISADKSITTAYLQWSSLKAS | WYQQKPGQAPRLLIYGASSRATGIPDRLSGSGSG |
| | DTAMYYCARHDIEGFDYWGRGTLVTVSS (SEQ ID NO: 387) | TDFTLTITRLEPEDFAVYYCQQYDSSAITFGQGTR |
| | | LEIK (SEQ ID NO: 452) |
| HSV- | QVQLQQSGAEVKKPGSSVRVSCKASGGTFNNNAINWVRQAPG | SSELTQDPAVSVALGQTVRVTCQGDSLRSYYAS |
| AB34 | QGLEWMGGIIPMFGTAKYSQNFQGRVAITADESTGTASMELSSL | WYQQKPGQAPVLVIYGKNNRPSGIPDRFSGSSSG |
| | RSEDTAVYYCARSRDLLLFPHHALSPWGRGTMVTVSS (SEQ ID | NTASLTITGAQAEDEADYYCSSRDSSGNHWVFG |
| | NO: 388) | GGTELTVL (SEQ ID NO: 453) |
| HSV- | QLQQSGTVLARPGASVKMSCKASGYSFTRYWMHWIKQRPGQG | QIVSTQSPAIMSASPGEKVTMTCSASSSRSYMQW |
| AB35 | LEWIGAIYPGNSDTSYNQKFEGKAKLTAVTSASTAYMELSSLTH | YQQKPGTSPKRWIYDTSKLASGVPARFSGSGSGT |
| | EDSAVYYCSRDYGYYFDFWGQGTTLTVSS (SEQ ID NO: 389) | SYSLTISSMEAEDAATYYCHQRSSYTFGGGTKLE |
| | | IK (SEQ ID NO: 454) |
| HSV- | QVQLVQSGAEVKKPGSSVKVSCKASGYTFTSYRMHWVRQAPG | DIQMTQSPSTESASVGDRVTITCSASSSISYMHW |
| AB36 | QGLEWIGYINPSTGYTEYNQKFKDKATITADESTNTAYMELSSL | YQQKPGKAPKLLIYTTSNLASGVPARFSGSGSGT |
| | RSEDTAVYYCARGGGVFDYWGQGTLVTVSS (SEQ ID | EFTLTISSLQPDDFATYYCHQRSTYPLTFGQGTK |
| | NO: 390) | VEVK (SEQ ID NO: 455) |
| HSV- | EVQLVESGGGLEQPGGSLRLSCAGSGFTFRDYAMTWVRQAPGK | DIVMTQSPLSLPVTPGEPASISCRSSQSLLYSIGYN |
| AB37 | GLEWVSSISGSGGNTYYADSVKGRFTISRDNSKNTLYLQMNSLR | YLDWYLQKSGQSPQLLIYLGSNRASGVPDRFSGS |
| | AEDTAVYYCAKDRLSITIRPRYYGLDVWGQGTTVTVSS (SEQ ID | GSGTDETLKISRVEAEDVGFYYCMQALQTPYTE |
| | NO: 391) | GQGTKLEIK (SEQ ID NO: 456) |
| HSV- | EVQLVESGGGLVQPGGSLRLSCAASGFTFNNYAMNWVRQAPG | DIVMTQSPDSLAVSLGERATINCKSSQSVLYRSN |
| AB38 | KGLDWVSTISGSGGTTNYADSVKGRFIISRDSSKHTLYLQMNSL | NRNFLGWYQQKPGQPPNLLIYWASTRESGVPDR |
| | RAEDTAVYYCAKDSNWGIVEDLWGRGTLVTVSS (SEQ ID NO: | ESGSGSGTDETLTISSLQAEDVAVYYCQQYYTTP |
| | 392) | YTEGQGTKLEIK (SEQ ID NO: 457) |
| HSV- | QVQLVQSGAEVAKPGTSVKLSCKASGYTFTDYWMQWVKQRPG | DIVMTQSHLSMSTSLGDPVSITCKASQDVSTVVA |
| AB39 | QGLEWIGTIYPGDGDTGYAQKFQGKATLTADKSSKTVYMHLSS | WYQQKPGQSPRRLIYSASYRYIGVPDRFTGSGAG |
| | LASEDSAVYYCARGDYYGSNSLDYWGQGTSVTVSS (SEQ ID | TDETETISSVQAEDLAVYYCQQHYSPPYTEGGGT |
| | NO: 393) | KLEIK (SEQ ID NO: 458) |
| HSV- | EVQLLESGGVLVQPGGSLRLSCAASGFTFSNFGMTWVRQAPGK | DIQMTQSPSSLSASVGDSITITCRASLSINTFLNW |
| AB40 | GLEWVSGISGGGRDTYFADSVKGRFTISRDNSKNTLYLQMNSLK | YQQKPGKAPNLLIYAASSLHGGVPSRFSGSGSGT |
| | GEDTAVYYCVKWGNIYFDYWGQGTLVTVSS (SEQ ID | DETLTIRTLQPEDEATYYCQQSSNTPETEGPGTVV |
| | NO: 394) | DFR (SEQ ID NO: 459) |
| HSV- | EVQLQESGGVLVKPGGSLKLSCAASGEVESSYDMSWVRQTPEK | DIQMTQSPASLSASVGETVTITCRASENIFSYLAW |
| AB41 | RLEWVAYISSGGGITYFPDTVQGRETVSRDNAKNTLYLQMNSL | YQQKQGKSPQLLVYNTKTLAEGVPSRFSGSGSG |
| | KSEDTAIYYCAAHVEGSSGPFAYWGQGTLVTVSA (SEQ ID NO: | TQFSLKINSLQPEDEGSYYCQHHYGTPETEGSGT |
| | 395) | KLEIK (SEQ ID NO: 460) |
| HSV- | QVQLVQSGAEVKKPGSSVKVSCKASGYTESSNVISWVRQAPGQ | ETVLTQSPGTLSLSPGERATLSCRASQSLGSSYLA |
| AB42 | GLEWMGGVIPIVDIANYAQRFKGRVTITADESTSTTYMELSSLRS | WYQQKPGQAPRLLIVGASSRAPGIPDRESGSGSG |
| | EDTAVYYCASTLGLVLDAMDYWGQGTLVTVSS (SEQ ID NO: | TDETLTISRLEPEDFAVYYCQQYADSPITEGQGTR |
| | 396) | LEIK (SEQ ID NO: 461) |
| HSV- | EVQLKESGPGLVAPGGSLSITCTVSGFSLTDSSINWVRQPPGKGL | DIVLTQSPASLAVSLGQRATISCRASESVDSYGQS |
| AB43 | EWLGMIWGDGRIDYADALKSRLSISKDSSKSQVFLEMTSLRTDD | YMHWYQQKAGQPPKWYLASNLESGVPARESG |
| | TATYYCARDGYFPYAMDFWGQGTSVTVSS (SEQ ID NO: 397) | SGSRTDETLTIDPVQAEDAATYYCQQNAEDSRTE |
| | | GGGTKLEIK (SEQ ID NO: 462) |
| HSV- | QVQLQQSGPELVKPGASVKISCKASGYSFTSYWIHWIKQRPGQG | DIQMTQSPASLSVSVGDTITLTCHASQNIDVWLS |
| AB44 | LEWIGMIDPSDGETRLNQRFQGRATLTVDESTSTAYM | QLRSPTSWEQQKPGNIPKWYKASNLHTGVPSRFSGSGSG |
| | EDSAVYYCTRLKEYGNYDSEYEDVWGAGTLVTVSS (SEQ ID | TGETLTISSLQPEDIATYYCQQAHSYPETEGGGTK |
| | NO: 398) | LEIK (SEQ ID NO: 463) |
| HSV- | QAQLQVSGAEVVKPGASVKMSCKASGYTFTSYNMHWVKQTPG | EIVLTQSPATMSASPGERVTITCSAHSSVSFMHW |
| AB45 | QGLEWIGYIYPGNGATNYNQKFQGKATLTADTSSSTAYMQISSL | FQQKPGTSPKLWIYSTSSLASGVPARFGGSGSGT |
| | TSEDSAVYFCARGDSVPFAYWGQGTLVTVSA (SEQ ID | SYSLTISSMEAEDAATYYCQQRSSFPLTFGAGTK |
| | NO: 399) | LELK (SEQ ID NO: 464) |
| HSV- | QAQLQVSGAEVVKPGASVKMSCKASGYTFTSYNMHWVKQTPG | EIVLTQSPATMSASPGERVTITCSAHSSVSFMHW |
| AB46 | QGLEWIGYIYPGNGATNYNQKFQGKATLTADPSSSTAYMQISSL | FQQKPGTSPKLWIYSTSSLASGVPARFGGSGSGT |
| | TSEDSAVYFCARGDSVPFAYWGQGTLVTVSA (SEQ ID | SYSLTISSMEAEDAATYYCQQRSSFPLTFGAGTK |
| | NO: 400) | LELK (SEQ ID NO: 464) |
| HSV- | QVQLVESGGGVVQPGRSLRLSCVASGETESSYGMHWVRQAPGK | EIVLTQSPATLSLSPGERTTLSCRASQRISTYLAW |
| AB47 | GLEWVAIIWYDGSNKYYADSVKGRETISRDNSKNTQYLQMNSL | YQQKPGQAPRLLIYDASKRATGIPARFSGSGSGT |
| | RAEDTAVYYCASVATSGDFDYYGMDVWGQGTTVTVSS (SEQ | GETLTISSLEPEDFAVYYCQQRSNWPLTEGGGTK |
| | ID NO: 401) | VEIK (SEQ ID NO: 465) |
| HSV- | EVQLVESGGGVVRPGGSLRLSCAASGETFDDYGMTWVRQAPG | DIQMTQSPSSLSASLGDRVTITCRASQSINSYLNW |
| AB48 | RGLEWVSGIHWHGKRTGYADSVKGRFTISRDNAKKSLYLQMNS | YQQKPGKAPKLLIYVASSLQSGVPSRFSGSGSGT |
| | LKGEDTALYHCVRGGMSTGDWFDPWGQGTLVIVSS (SEQ ID | EFTLTISNLQPEDEATYYCQQSYSTPPITEGQGTR |
| | NO: 402) | LEIK (SEQ ID NO: 466) |
| HSV- | EVMLVESGGALVKPGGSLKLSCAASGETESNYAMSWVRQIPEK | QIVLTQSPAIMSASLGERVTMTCTASSSVSSSYLH |
| AB49 | RLEWVATISSGGSHTYYLDSVKGRFTISRDNARDTLYLQMSSLR | WYQQKPGSSPKLWIYSTSNLASGVPARFSGSGSG |
| | SEDTALYYCARLFTGYAMDYWGQGTSVTVSS (SEQ ID NO: | TEYSLTISSMEAEDDATYYCHQYYRLPPITEGAG |
| | 403) | TKLELK (SEQ ID NO: 467) |
| HSV- | EVQLVESGGNLEQPGGSLRLSCTASGETESRSAMNWVRRAPGK | DIQMTQSPSSVSASVGDRVTITCRASQGIFSWLA |
| AB50 | GLEWVSGISGSGGRTYYADSVKGRFTISRDNSKNTLYLQMNSLS | WYQQKPGKAPKLLIYAASSLQSGVPSRESGSGSG |
| | AEDTAAYYCAKDSYTTSWYGGMDVWGHGTTVTVSS (SEQ ID | TDETLTISSLQPEDFAIYYCQQANSVPITEGQGTR |
| | NO: 404) | LEIK (SEQ ID NO: 468) |
| HSV- | QVQLVQSGAEVKKPGSSVKVSCKASGYIFTNYNIHWVKKSPGQ | DIQMTQSPSSLSASVGDRVTITCKASQDIDRYMA |
| AB51 | GLEWIGAIYPGNGDAPYSQKFQGKATLTADTSTSTTYMELSSLR | WYQDKPGKAPRLLIHDTSTLQSGVPSRFSGSGSG |
| | SEDTAVYYCVRANWDVAFAYWGQGTLVTVSS (SEQ ID NO: | RDYTLTISNLEPEDEATYYCLQYDNLWTEGGGT |
| | 405) | KVEIK (SEQ ID NO: 469) |
| HSV- | EVQLVESGGGVIQPGGSLRLSCAASGETEDDYAMNWVRQGPGK | DIQMTQSPSTLSASVGDRVTITCRASQSIRSWLA |
| AB52 | GLEWVSAISGDGGSTYYADSVKGRFTISRDNSKNSLYLQMNSLR | WYQQKPGKAPKLLIYKASSLESGVPSRFSGSGSG |
| | AEDTAFFYCAKDLRNTIEGVVIPDAFDIWGQGTMVTVSS (SEQ | TEETLTISSLQPDDEATYYCQQYNSYSYTEGQGT |
| | ID NO: 406) | KLEIK (SEQ ID NO: 470) |
| HSV- | QVQLVQSGAEVKKPGASVKVSCKVSGETLTELSIHWVRQAPGK | DIQMTQSPSSLSASAGDRVTITCRASQAIRNDLG |
| AB53 | GLEWMGGFDPEDGETIYAQKFQGRVTMTEDTSTDTAYMELTSL | WYQQKPGKAPKRLIYAAFNLQSGVPSRESGSGS |
| | RSEDTAVYYCSTIEGVVTNEDNWGQGTLVTVSS (SEQ ID NO: | GTEETLTISSLQPEDLASYYCQQYNRYPWTEGQG |
| | 407) | TKVEIK (SEQ ID NO: 471) |
| HSV- | QVQLQESGPGLVKPSETLSLTCTVSGGSESSHEWSWIRQPPGKGL | EIVLTQSPGTLSLSPGERATLSCRASQSVSSSYLA |
| AB54 | EWIGYILYTGGTSENPSLKSRVSMSVGTSKNQESLKLSSVTAADT | WYQQKPGQAPRLLIVGASSRATGIPDRESGSGSG |
| | AVYYCARARSGITFTGIIVPGSFDIWGQGTMVTVSS (SEQ | TDETLTISRLEPEDFAVYYCQQYGSSPWTEGQGT |
| | ID NO: 408) | KVEIK (SEQ ID NO: 472) |
| HSV- | QVQLVESGGGVVQPGKSLRLSCVASGFTFSSDAMYWVRQAPG | DIQMTQSPSSLSASVGDRVTITCRASQSISSYLNW |
| AB55 | KGLEWVAVIYYDGNYQYYEDSVKGRFTISRDNSQNTLDLQMNS | YQQKPGKAPKLLIYAASSLQSGVPSRFSGSGSGT |
| | LRVDDTAVYFCARLNWDYWYLDLWGRGTLVTVSS (SEQ ID | DFTLTISSLQPEDFATYYCQQSYSTPPITFGQGTR |
| | NO: 409) | LEIK (SEQ ID NO: 473) |
| HSV- | EVQLVESGGGLVQPGRSLRLSCAASGFTFDDYTMHWVRQAPGK | AEIVMTQSPATLSVSPGERATLSCRASQSVSSNL |
| AB56 | GLEWVSGISWNSGSIGYADSVKGRFTISRDNAKKSLYLQMNSLR | AWYQQKPGQAPRLLIYGASTRATGIPARFSGSGS |
| | AEDTALYYCAKDNSGYGHYYYGMDVWGQGTTVTVAS (SEQ | GTEFTLTISSLQSEDFAVYYCQHYINWPLTFOGG |
| | ID NO: 410) | TKVEIK (SEQ ID NO: 474) |
| HSV- | EVQLVESGGGLVQPGRSLRLSCVASGFTFNDYAMHWVRQAPG | AEIVMTQSPATLSVSPGERATLSCRASQSVSSNL |
| AB 57 | KGLEWVSVISWNSDSIGYADSVKGRFTISRDNAKNSLYLQMHSL | AWYQQKPGQAPRLLIYGASTRATGIPARFSGSGS |
| | RAEDTALYYCAKDNHYGSGSYYYYQYGMDVWGQGTTVTVSS | GTEFTLTISSLQSEDFAVYYCQHYINWPLTFOGG |
| | (SEQ ID NO: 411) | TKVEIK (SEQ ID NO: 474) |
| HSV- | EVQLVESGGGLVKPGGSLRLSCAASGFTERNYNINWVRQAPGK | DIQVTQSPSPLSASVGDRVTITCRASQGISNYLA |
| AB58 | GLEWVSLISGSSSYIYYADSVKGRFTVSRDNAKNSLYLQMNSLR | WYQQKPGRVPQLLIYAASTLQSGVPSRFSGSGSG |
| | AEDTAVYYCARRTLSYYVMDVWGQGTTVTVSS (SEQ ID NO: | TDFTLTISSLQPEDVATYYCQKYNSAPYTEGQGT |
| | 412) | KLEIK (SEQ ID NO: 475) |
| HSV- | QVQLQESGPGLVKPSETLSLTCTVSGDSVSSSYWTWIRQPPGKG | AIQMTQSPSSLSASVGDRVTITCRASQGIRNDLG |
| AB59 | LEWIGYIYYSGSSNYNPSLKSRATISVDTSKNQFSLKLSSVTAAD | WYQQKPGKAPKLLIYAAS SLQSGVPSRFAGRGS |
| | TAVYYCAREGNVDTTMIFDYWGQGTLVTVSS (SEQ ID | GTDFTLTISSLQPEDFATYYCLQDFNYPWTFGQG |
| | NO: 413) | TKVEIK (SEQ ID NO: 476) |
| HSV- | QVQLVESGGGVVQPGRSLRLSCAASGFTFSSFGMHWVRQAPGK | QSVLTQPPSVSAAPGQKVTISCSGSSSNIGNNYVS |
| AB60 | GLEWVAVISFDGSIKYSVDSVKGRFTISRDNSKNTLFLQMNSLR | WYQQLPGTAPKWYDNNKRPSGIPDRFSGSKSG |
| | AEDTAVYYCARDRLNYYDSSGYYHYKYYGMAVWGQGTTVTV | TSTTLGITGLQTGDEADYYCGTWDSRLSAVVFG |
| | SS (SEQ ID NO: 414) | GGTKLTVL (SEQ ID NO: 477) |
| HSV- | QVQLVQSGAEVKKPGASVKVSCKASGYTFTSSYINWVRQAPGQ | QSALTQPASVSGSPGQSITISCTGTSSDVGSYNYV |
| AB61 | GLEWMGTINPVSGSTSYAQKFQGRVTMTRDTSISTAYMELSRLR | NWYQQHPGKAPKLMIYGVSKRPSGVSNRFSGSK |
| | SDDTAVYYCARGGWFDYWGQGTLVTVSS (SEQ ID NO: 415) | SGNTASLTISGLQAEDEADYYCGTFAGGSYYGV |
| | | FOGGTKLTVL (SEQ ID NO: 478) |
| HSV- | EVQLVESGGGLVQPGGSLRLSCAASGYDFTHYGMNWVRQAPG | DIQLTQSPSSLSASVGDRVTITCSASQDISNYLNW |
| AB62 | KGLEWVGWINTYTGEPTYAADFKRRFTFSLDTSKSTAYLQMNS | YQQKPGKAPKVLIYFTSSLHSGVPSRFSGSGSGT |
| | LRAEDTAVYYCAKYPYYYGTSHWYFDVWGQGTLVTVSS (SEQ | DFTLTISSLQPEDFATYYCQQYSTVPWTFGQGTK |
| | ID NO: 416) | VEIK (SEQ ID NO: 479) |
| HSV- | QVQLVQSGAEVMKPGSSVKVSCKASGYTFSWYWLEWVRQAPG | EIVMTQSPATLSVSPGERATLSCRASQSIGTNIHW |
| AB63 | HGLEWMGEIDPGTFITNYNEKFKARVTFTADTSTSTAYMELSSL | YQQKPGQAPRLLIYYASESISGIPARFSGSGSGTE |
| | RSEDTAVYYCARFSHFSGSNYDYFDYWGQGTLVTVSS (SEQ ID | FTLTISSLQSEDFAVYYCQQSWSWPTTFGGGTKV |
| | NO: 417) | EIK (SEQ ID NO: 480) |
| HSV- | EVQLVESGGGLVQPGGSLRLSCAVSGYSITSGYSWNWIRQAPGK | DIQLTQSPSSLSASVGDRVTITCRASQSVDYDGD |
| AB64 | GLEWVASITYDGSTNYADSVKGRFTISRDDSKNTFYLQMNSLRA | SYMNWYQQKPGKAPKLLIYAASYLESGVPSRFS |
| | EDTAVYYCARGSHYFGHWHFAVWGQGTLVTVSS (SEQ ID NO: | GSGSGTDFTLTISSLQPEDFATYYCQQSHEDPYTF |
| 418) | GQGTKVEIK (SEQ ID NO: 481) | |
| HSV- | QVQLVESGGGVVQPGRSLRLSCAASGFTESSYGMHWVRQAPGK | DIVMTQSPLSLTVTPGEPASISCRSSQSLLYSNGY |
| AB65 | GLEWVAVISYEESNRYHADSVKGRFTISRDNSKITLYLQMNSLR | NYLDWYLQKPGQSPQVLISLGSNRASGVPDRFS |
| | TEDTAVYYCARDGGIAAPGPDYWGQGTLVTVSS (SEQ ID NO: | GSGSGTDFTLKISRVEAEDVGVYYCMQARQTPF |
| | 419) | TFGPGTKVDIR (SEQ ID NO: 482) |
| HSV- | EVQLQQSGPELVKPGASVRMSCKASGYTFTDYNIHWVKQSHGK | NIVLTQSPASLAVSLGQRATISCRASESVDNYGH |
| AB66 | SLEWIGYIYPNNGDNGYNQKFRGKATLTVDKSSSTAYMELRSLT | SFMHWYQQKPGQPPKWYLASNLESGVPARFS |
| | SDDSAVYYCARGRLRYFDVWGTGTTVTVSS (SEQ ID | GSGSRTDFTLTLDPVEADDAATYYCQQYNEDPP |
| | NO: 614) | TFGSGTKLEIK (SEQ ID NO: 866) |
| HSV- | EVQLVESGGDLVQPGGSLRLSCAASGFTESSYWMSWVRQAPGK | AIQLTQSPSSLSASVGDRVTITCRPSQGINWELA |
| AB67 | GLEWVANIKQDGSEKYYVDSVKGRFTISRDNAKNSLYLQMNSL | WYQQKPGKAPKLLIYDAS SLEQGVPSRFSGSGSG |
| | RAEDTAVYYCARDRGSLYYWGQGTLVTVSS (SEQ ID | TDFTLTISSLQPEDFATYYCQQFNSYPLTEGGGTK |
| | NO: 615) | VEIK (SEQ ID NO: 867) |
| HSV- | QVQLVQSGAEVKKPGSSVKVSCKASEGTFSSYAMSWVRQAPG | SYVLTQPPSASGTPGQSVTISCSGSTSNIGSHYVV |
| AB68 | QGLEWMGGIIPIEGTVNYAQKFQGRVTMTRDTSTSTVYMELSSL | WYQQLPGTAPRLLIYRNHQRPSGVPDRLSGSKS |
| | RSDDTAVYYCARRRGAKFDYWGQGTLVTVSS (SEQ ID NO: | GTSASLAIGGLRSEDEADYYCAVWDDTLSGWVF |
| | 616) | GGGTKLTVL (SEQ ID NO: 868) |
| HSV- | EVQLVQSGAEVKKPGESLKISCKGSGYSFTSYWIGWVRQMPGK | EIVLTQSPGTLSLSPGERATLSCRASQSISSSYLA |
| AB69 | GLEWMGVIYPGDSYTRYSPSFQGQVTISADKSISTAYLQWSSLK | WYQQKPGQAPRLLIYGASSRATGIPDRFSGSGSG |
| | ASDTAMYYCARMPNWGSLDHWGQGTLVTVSS (SEQ ID NO: | TDFTLTISRLEPEDFAVYYCQQYASFGQGTKVEI |
| | 1117) | K (SEQ ID NO: 1118) |

[0125] In some embodiments, one or more polynucleotides of the present disclosure encode an antibody comprising a heavy chain variable region comprising the sequence of SEQ ID NO: 355, and light chain variable region comprising the sequence of SEQ ID NO: 420. In some embodiments, one or more polynucleotides of the present disclosure encode an antibody comprising a heavy chain variable region comprising the sequence of SEQ ID NO: 356, and light chain variable region comprising the sequence of SEQ ID NO: 421. In some embodiments, one or more polynucleotides of the present disclosure encode an antibody comprising a heavy chain variable region comprising the sequence of SEQ ID NO: 357, and light chain variable region comprising the sequence of SEQ ID NO: 422.

[0126] A polynucleotide of the present disclosure encoding an antibody may further encode additional coding and non-coding sequences. Examples of additional coding and non-coding sequences may include, but are not limited to, sequences encoding additional polypeptide tags (e.g., encoded in-frame with the antibody in order to produce a fusion protein), introns (e.g., native, modified, or heterologous introns), 5′ and/or 3′ UTRs (e.g., native, modified, or heterologous 5′ and/or 3′ UTRs), and the like. Examples of suitable polypeptide tags may include, but are not limited, to any combination of purification tags, such as his-tags, flag-tags, maltose binding protein and glutathione-S-transferase tags, detection tags, such as tags that may be detected photometrically (e.g., green fluorescent protein, red fluorescent protein, etc.) and tags that have a detectable enzymatic activity (e.g., alkaline phosphatase, etc.), tags containing secretory sequences, signal sequences, leader sequences, and/or stabilizing sequences, protease cleavage sites (e.g., furin cleavage sites, TEV cleavage sites, Thrombin cleavage sites, etc.), and the like. In some embodiments, the 5′ and/or 3′UTRs increase the stability, localization, and/or translational efficiency of the polynucleotides. In some embodiments, the 5′ and/or 3′UTRs improve the level and/or duration of protein expression. In some embodiments, the 5′ and/or 3′UTRs include elements (e.g., one or more miRNA binding sites, etc.) that may block or reduce off-target expression (e.g., inhibiting expression in specific cell types (e.g., neuronal cells), at specific times in the cell cycle, at specific developmental stages, etc.). In some embodiments, the 5′ and/or 3′UTRs include elements (e.g., one or more miRNA binding sites, etc.) that may enhance antibody expression in specific cell types.

[0127] In some embodiments, a polynucleotide of the present disclosure encodes a leader, signal, and/or secretory sequence (in-frame) at the N-terminus of an encoded antibody. Any leader, signal, and/or secretory sequence known in the art may be encoded by a polynucleotide of the present disclosure, including, for example, a native antibody signal sequence (e.g., any of the antibody leader sequences described in Retter I et al. VBASE2, an integrative V gene database. Nucleic Acids Res. 2005 Jan. 1; 33: D671-4), or a heterologous or synthetic signal sequence (see e.g., von Heijne G. (1983) Patterns of amino acids near signal-sequence cleavage sites. Eur J Biochem 133 (1) 17-21; Martoglio B. and Dobberstein B. (1998) Signal sequences: More than just greasy peptides. Trends Cell Biol 8 (10), 410-5; Hegde R. S. and Bernstein H. D. (2006) The surprising complexity of signal sequences. Trends Biochem Sci 31(10), 563-71; Kapp K., Schrempf S., Lemberg M. K. and Dobberstein B. (2009) Post-Targeting Functions of Signal Peptides. Chapter in: Protein Transport into the Endoplasmic Reticulum, Landes Bioscience; and the sequences disclosed in www.signalpeptide.de). Exemplary secretion sequences include the human CD33 leader sequence (MPLLLLLPLLWAGALA, SEQ ID NO: 483), the human IL2 leader sequence (MYRMQLLSCIALSLALVTNS, SEQ ID NO: 484), the human tissue plasminogen activator leader sequence (MDAMKRGLCCVLLLCGAVFVSP, SEQ ID NO: 485), human antibody leader sequences (Tables 3A-C), and the synthetic secrecon leader sequence (MWWRLWWLLLLLLLLWPMVWA, SEQ ID NO: 486).

TABLE 3A
Human antibody heavy chain leader sequences

| | SEQ |
|---|---|
| Leader sequence: | ID NO: |
| MDWTWRILFLVAAATGAHS | 487 |
| MDWTWRVFCLLAVAPGAHS | 488 |
| MEFGLSWVFLVAIIKGVQC | 489 |
| MEFGLSWVFLVALLRGVQC | 490 |
| MEFGLSWVFLVAILKGVQC | 491 |
| MSVSFLIFLPVLGLPWGVLS | 492 |
| MDWTWSILFLVAAPTGAHS | 493 |
| MEFWLSWVFLVAILKGVQC | 494 |
| MDWTWRILFLVAAATSAHS | 495 |
| MDWIWRILFLVGAATGAHS | 496 |
| MELGLSWVFLVAILEGVQC | 497 |
| MELGLCWVFLVAILEGVQC | 498 |
| MKHLWFFLLLVAAPRWVLP | 499 |
| MKHLWFLLLWCQLPDVGVLS | 500 |
| MDCTWRILFLVAAATGTHA | 501 |
| MDTLCYTLLLLTTPSWVLS | 502 |
| MELGLRWVFLVAILEGVQC | 503 |
| MTEFGLSWVFLVAIFKGVQC | 504 |
| MGSTAILALLLAVLQGVCS | 505 |
| MDTLCSTLLLLTIPSWVLS | 506 |
| MEFGLSWIFLAAILKGVQC | 507 |
| MDWTWRILFLVAAATDAYS | 508 |
| MELGLSWIFLLAILKGVQC | 509 |
| MEFGLSWLFLVAILKGVQC | 510 |
| MEFGLSWVFLVVILQGVQC | 511 |
| MGSTAILGLLLAVLQGVCA | 512 |
| MKHLWFFLLLVAAPRWVLS | 513 |

TABLE 3B
Human antibody light chain (kappa)
leader sequences

| Leader sequence: | SEQ ID NO: |
|---|---|
| MDMRVPAQLLGLLLLWLRGARC | 514 |
| MDMRVPAQLLGLLQLWLSGARC | 515 |
| MDMRVPAQLLGLLLLWLSGARC | 516 |
| MDMRVPAQLLGLLLLWLPDTRC | 517 |
| MDMRVPAQLLGLLLLWFPGARC | 518 |
| MDMRVLAQLLGLLLLCFPGARC | 519 |
| MDMRVPAQLLGLLLLWFPGSRC | 520 |
| MDMRVPAQRLGLLLLWFPGARC | 521 |
| MRVPAQLLGLLLLWLPGARC | 522 |
| MDMRVPAQLLGLLLLWLPGARC | 523 |
| MDMRVPAQLLGLLLLWLPGAKC | 524 |
| MRLPAQLLGLLMLWVPGSSE | 525 |
| MVSPLQFLRLLLLWVPASRG | 526 |
| MRLPAQLLGLLMLWVPGSSE | 527 |
| MRLPAQLLGLLMLWVPGSSG | 528 |
| MRLPAQLLGLLMLWIPGSSA | 529 |
| MRLPAQLLGLLMLWVSGSSG | 530 |
| MRLLAQLLGLLMLWVPGSSG | 531 |
| METPAQLLFLLLLWLPDTTG | 532 |
| MEAPAQLLFLLLLWLPDTTG | 533 |
| MEAPAQLLFLLLLWLTDTTG | 534 |
| MEPWKPQHSFFFLLLLWLPDTTG | 535 |
| MVLQTQVFISLLLWISGAYG | 536 |
| MGSQVHLLSFLLLWISDTRA | 537 |
| MLPSQLIGFLLLWVPASRG | 538 |

TABLE 3C
Human antibody light chain (lambda)
leader sequences

| Leader sequence: | SEQ ID NO: |
|---|---|
| MAWSPLFLTLITHCAGSWA | 539 |
| MAWSPLLLTLLAHCTGSWA | 540 |
| MASFPLLLTLLTHCAGSWA | 541 |
| MAGFPLLLTLLTHCAGSWA | 542 |
| MTCSPLLLTLLIHCTGSWA | 543 |
| MAWALLLLSLLTQGTGSWA | 544 |
| MAWALLLLTLLTQGTGSWA | 545 |
| MAWALLLLTLLTQDTGSWA | 546 |
| MAWIPLFLGVLAYCTGSVA | 547 |
| MAWTALLLSLLAHFTGSVA | 548 |
| MAWTPLLLPLLTFCTVSEA | 549 |
| MAWTPLWLTLLTLCIGSVV | 550 |
| MAWTVLLLGLLSHCTGSVT | 551 |
| MAWATLLLPLLNLYTGSIA | 552 |
| MAWIPLLLPLLTLCTGSEA | 553 |
| MAWIPLLLPLLILCTVSVA | 554 |
| MAWVSFYLLPFIFSTGLCA | 555 |
| MAWTQLLLLFPLLLHWTGSLS | 556 |
| MAWTPLLFLTLLLHCTGSLS | 557 |
| MAWTPLLLLLLSHCTGSLS | 558 |
| MAWTPLLLLFLSHCTGSLS | 559 |
| MAWTLLLLVLLSHCTGSLS | 560 |
| MAWAPLLLTLLAHCTGSWA | 561 |
| MAWTPLFLFLLTCCPGSNS | 562 |
| MAWMMLLLGLLAYGSGVDS | 563 |
| MAWAPLLLTLLSLLTGSLS | 564 |
| MPWALLLLTLLTHSAVSVV | 565 |

[0128] In some embodiments, a polynucleotide of the present disclosure encoding an antibody is operably linked to one or more (e.g., one or more, two or more, three or more, four or more, five or more, ten or more, etc.) regulatory sequences. The term “regulatory sequence” may include enhancers, insulators, promoters, and other expression control elements (e.g., polyadenylation signals). Any suitable enhancer(s) known in the art may be used, including, for example, enhancer sequences from mammalian genes (such as globin, elastase, albumin, α-fetoprotein, insulin and the like), enhancer sequences from a eukaryotic cell virus (such as SV40 enhancer on the late side of the replication origin (bp 100-270), the cytomegalovirus early promoter enhancer, the polyoma enhancer on the late side of the replication origin, adenovirus enhancers, and the like), and any combinations thereof. Any suitable insulator(s) known in the art may be used, including, for example, HSV chromatin boundary (CTRL/CTCF-binding/insulator) elements CTRL1 and/or CTRL2, chicken hypersensitive site 4 insulator (cHS4), human HNRPA2B1-CBX3 ubiquitous chromatin opening element (UCOE), the scaffold/matrix attachment region (S/MAR) from the human interferon beta gene (IFNB1), and any combinations thereof. Any suitable promoter (e.g., suitable for transcription in mammalian host cells) known in the art may be used, including, for example, promoters obtained from the genomes of viruses (such as polyoma virus, fowlpox virus, adenovirus (such as Adenovirus 2), bovine papilloma virus, avian sarcoma virus, cytomegalovirus, a retrovirus, hepatitis-B virus, Simian Virus 40 (SV40), and the like), promoters from heterologous mammalian genes (such as the actin promoter (e.g., the β-actin promoter, a ubiquitin promoter (e.g., a ubiquitin C (UbC) promoter), a phosphoglycerate kinase (PG) promoter, an immunoglobulin promoter, from heat-shock promoters, and the like), promoters from homologous mammalian genes (e.g., native human immunoglobulin promoters), synthetic promoters (such as the CAGG promoter), and any combinations thereof, provided such promoters are compatible with the host cells. Regulatory sequences may include those which direct constitutive expression of a nucleic acid, as well as tissue-specific regulatory and/or inducible or repressible sequences.

[0129] In some embodiments, a polynucleotide of the present disclosure is operably linked to one or more heterologous promoters. In some embodiments, the one or more heterologous promoters are one or more of constitutive promoters, tissue-specific promoters, temporal promoters, spatial promoters, inducible promoters and repressible promoters. In some embodiments, the one or more heterologous promoters are one or more of the human cytomegalovirus (HCMV) immediate early promoter, the human elongation factor-1 (EF1) promoter, the human β-actin promoter, the human UbC promoter, the human PGK promoter, a human immunoglobulin promoter, the synthetic CAGG promoter, and any combinations thereof. In some embodiments, a polynucleotide of the present disclosure encoding an antibody is operably linked to an HCMV promoter.

[0130] In some embodiments, a polynucleotide of the present disclosure does not comprise the coding sequence of (e.g., a transgene encoding) a Collagen alpha-1 (VII) chain polypeptide (COLT). In some embodiments, a polynucleotide of the present disclosure does not comprise the coding sequence of (e.g., a transgene encoding) a Lysyl hydroxylase 3 polypeptide (LH3). In some embodiments, a polynucleotide of the present disclosure does not comprise the coding sequence of (e.g., a transgene encoding) a Keratin type I cytoskeletal 17 polypeptide (KRT17). In some embodiments, a polynucleotide of the present disclosure does not comprise the coding sequence of (e.g., a transgene encoding) a transglutaminase (TGM) polypeptide (e.g., a human transglutaminase polypeptide such as a human TGM1 polypeptide). In some embodiments, a polynucleotide of the present disclosure does not comprise the coding sequence of (e.g., a transgene encoding) a cosmetic protein (e.g., collagen proteins, fibronectins, elastins, lumicans, vitronectins/vitronectin receptors, laminins, neuromodulators, fibrillins, additional dermal extracellular matrix proteins, etc.). In some embodiments, a polynucleotide of the present disclosure does not comprise the coding sequence of (e.g., a transgene encoding) a Collagen alpha-1 (VII) chain polypeptide, a Lysyl hydroxylase 3 polypeptide, a Keratin type I cytoskeletal 17 polypeptide, and/or any chimeric polypeptides thereof. In some embodiments, a polynucleotide of the present disclosure does not comprise the coding sequence of (e.g., a transgene encoding) a Collagen alpha-1 (VII) chain polypeptide, a Lysyl hydroxylase 3 polypeptide, a Keratin type I cytoskeletal 17 polypeptide, a transglutaminase (TGM) polypeptide (e.g., a human transglutaminase polypeptide such as a human TGM1 polypeptide), a cosmetic protein, and/or any chimeric polypeptides thereof.

[0131] Polynucleotides Encoding Single-chain Antibodies

[0132] In some embodiments, a recombinant nucleic acid (e.g., a recombinant herpes virus genome) of the present disclosure comprises one or more polynucleotides encoding an antibody, where the antibody is a single-chain antibody. Any suitable form of single-chain antibody known in the art may be encoded by a polynucleotide of the present disclosure. In some embodiments, the single-chain antibody comprises a heavy chain variable region and a light chain variable region. In some embodiments, the single-chain antibody comprises a heavy chain variable region and a light chain variable region separated by a linker polypeptide. In some embodiments, the single-chain antibody comprises, from N-terminus to C-terminus, 1) a heavy chain variable region, 2) a linker polypeptide, and 3) a light chain variable region. In some embodiments, the single-chain antibody comprises, from N-terminus to C-terminus, 1) a light chain variable region, 2) a linker polypeptide, and 3) a heavy chain variable region. In some embodiments, the single-chain antibody further comprises an antibody hinge region (e.g., an IgG1 hinge region). An exemplary IgG1 hinge region is provided as SEQ ID NO: 603. In some embodiments, the single-chain antibody further comprises an antibody Fc region (e.g., an IgG1 Fc region). An exemplary human IgG1 Fc region is provided as SEQ ID NO: 604. In some embodiments, the single-chain antibody is an scFv-Fc antibody (e.g., an scFv fused to the hinge and Fc region of an IgG1 antibody heavy chain).

[0133] Any suitable linker polypeptide known in the art may be used in a single-chain antibody of the present disclosure, including, for example, a GGGGSGGGGSGGGGS (SEQ ID NO: 566) linker, a GGSSRSSSSGGGGSGGGG (SEQ ID NO: 567) linker, a GGGGSGGGGSGGGGSGGGGS (SEQ ID NO: 568) linker, a CGGGSGGGGSGGGGS (SEQ ID NO: 569) linker, a SHGGHGGGGSGGGGS (SEQ ID NO: 570) linker, a MGGMSGGGGSGGGGS (SEQ ID NO: 571) linker, a YGGYSGGGGSGGGGS (SEQ ID NO: 572) linker, a WGGYSGGGGSGGGGS (SEQ ID NO: 573) linker, a SVSVGMKPSPRP (SEQ ID NO: 574) linker, a VISNHAGSSRRL (SEQ ID NO: 575) linker, a PWIPTPRPTFTG (SEQ ID NO: 576) linker, a RGRGRGRGRGR (SEQ ID NO: 577) linker, etc.

[0134] Exemplary polynucleotides encoding single-chain antibodies comprising a leader sequence, an antibody heavy chain variable region, a linker polypeptide, an antibody light chain variable region, and an antibody hinge and Fc region are provided as SEQ ID NOS: 578-583.

[0135] Polynucleotides Comprising Multiple Expression Cassettes

[0136] In some embodiments, a recombinant nucleic acid (e.g., recombinant herpes virus genome) of the present disclosure comprises one or more polynucleotides encoding an antibody, where at least one of the polynucleotides comprises two or more expression cassettes. In some embodiments, the polynucleotide comprises, from 5′ to 3′, a first expression cassette encoding a polypeptide comprising an antibody heavy chain variable region (e.g., a full-length antibody heavy chain), and a second expression cassette encoding a polypeptide comprising an antibody light chain variable region (e.g., a full-length antibody light chain). In some embodiments, the polynucleotide comprises, from 5′ to 3′, a first expression cassette encoding a polypeptide comprising an antibody light chain variable region (e.g., a full-length antibody light chain), and a second expression cassette encoding a polypeptide comprising an antibody heavy chain variable region (e.g., a full-length antibody heavy chain). In some embodiments, the first and second expression cassettes have independent regulatory sequences (e.g., promoters, enhancers, polyadenylation signals, etc.).

[0137] In some embodiments, the first and second expression cassettes are in the same orientation in the DNA. In some embodiments, the first and second expression cassettes are in opposite orientations to one another in the DNA. Without wishing to be bound by theory, incorporating two expression cassettes in an antisense orientation (opposite strands of DNA) may help to avoid read-through and ensure proper expression of each cassette.

[0138] Polynucleotides Encoding Polycistronic mRNAs

[0139] In some embodiments, a recombinant nucleic acid (e.g., recombinant herpes virus genome) of the present disclosure comprises one or more polynucleotides encoding an antibody, where at least one of the polynucleotides encodes a polycistronic mRNA. In some embodiments, the polycistronic mRNA comprises: 1) a first open reading frame (ORF) encoding a polypeptide comprising an antibody heavy chain variable region (e.g., an antibody heavy chain), and 2) a second open reading frame (ORF) encoding a polypeptide comprising an antibody light chain variable region (e.g., an antibody light chain). In some embodiments, the polycistronic mRNA comprises: 1) a first open reading frame (ORF) encoding a polypeptide comprising an antibody light chain variable region (e.g., an antibody light chain), and 2) a second open reading frame (ORF) encoding a polypeptide comprising an antibody heavy chain variable region (e.g., an antibody heavy chain). In some embodiments, the polycistronic mRNA further comprises an internal ribosomal entry site (IRES) separating the first ORF and the second ORF. In some embodiments, the polycistronic mRNA comprises, from 5′ to 3′, the first ORF encoding the polypeptide comprising the antibody heavy chain variable region—the IRES—the second ORF encoding the polypeptide comprising the antibody light chain variable region. In some embodiments, the polycistronic mRNA comprises, from 5′ to 3′, the first ORF encoding the polypeptide comprising the antibody light chain variable region—the IRES—the second ORF encoding the polypeptide comprising the antibody heavy chain variable region.

[0140] Any suitable IRES known in the art may be used in the polycistronic mRNAs of the present disclosure, including, for example, a virally-derived IRES (e.g. an IRES derived from a poliovirus, rhinovirus, encephalomyocarditis virus (EMCV), foot-and-mouth disease virus, hepatitis C virus, classic swine fever virus, rous sarcoma virus, human immunodeficiency virus, cricket paralysis virus, Kaposi's sarcoma-associated herpesvirus, etc.), a cellular mRNA-derived IRES (e.g. an IRES derived from growth factor mRNAs, such as fibroblast growth factor 2, platelet-derived growth factor B, and vascular endothelial growth factor; an IRES derived from transcription factor mRNAs, such as antennapedia, ultrabithorax, and NF-κB repressing factor; an IRES derived from oncogene mRNAs, such as c-myc, pim-1, and protein kinase p58^{PITSLRE}, etc.), a synthetic IRES (e.g., a CP148 IRES), and others (see e.g., Mokrejs et al. (2007) A Bioinformatical Approach to the Analysis of Viral and Cellular Internal Ribosome Entry Sites. Columbus F editors. New Messenger RNA Research Communications. Hauppauge, N.Y.: Nova Science Publishers; pp. 133-166; see also Mokrejs et al. (2006) Nucleic Acids Res 1; 34(Database issue): D125-30).

[0141] In some embodiments, the IRES is a CP148 IRES. An exemplary nucleic acid sequence encoding a CP148 IRES is provided as SEQ ID NO: 584. In some embodiments, the IRES is an EMCV IRES. An exemplary nucleic acid sequence encoding an EMCV IRES is provided as SEQ ID NO: 585.

[0142] In some embodiments, the nucleic acid sequence encoding the IRES has at least 80%, at least 85%, at least 90%, at least 91%, at least 92%, at least 93%, at least 94%, at least 95%, at least 96%, at least 97%, at least 98%, at least 99%, or 100% sequence identity to a nucleic acid sequence selected from SEQ ID NO: 584 or SEQ ID NO: 585. In some embodiments, the nucleic acid sequence encoding the IRES has the sequence of SEQ ID NO: 584 or SEQ ID NO: 585.

[0143] Exemplary polynucleotides encoding polycistronic mRNAs comprising 1) a first ORF encoding a leader sequence and an antibody light chain (Kappa), 2) an IRES, and 3) second ORF encoding a leader sequence and an antibody heavy chain (IgG1) are provided as SEQ ID NOS: 586-588.

[0144] Polynucleotides Encoding Chimeric Polypeptides

[0145] In some embodiments, a recombinant nucleic acid (e.g., recombinant herpes virus genome) of the present disclosure comprises one or more polynucleotides encoding a chimeric polypeptide comprising an antibody heavy chain variable region and an antibody light chain variable region separated by a cleavable linker polypeptide. In some embodiments, the chimeric polypeptide comprises a first amino acid sequence comprising an antibody heavy chain and a second amino acid sequence comprising an antibody light chain separated by a cleavable linker polypeptide. In some embodiments, the chimeric polypeptide comprises, from N-terminus to C-terminus, 1) a first amino acid sequence comprising an antibody light chain variable region (e.g., an antibody light chain), 2) a cleavable linker polypeptide, and 3) a second amino acid sequence comprising an antibody heavy chain variable region (e.g., an antibody heavy chain). In some embodiments, the chimeric polypeptide comprises, from N-terminus to C-terminus, 1) a first amino acid sequence comprising an antibody heavy chain variable region (e.g., an antibody heavy chain), 2) a cleavable linker polypeptide, and 3) a second amino acid sequence comprising an antibody light chain variable region (e.g., an antibody light chain).

[0146] Any cleavable linker polypeptide known in the art may be used in the chimeric polypeptides of the present disclosure, including, for example, a T2A linker (RAKRGSGEGRGSLLTCGDVEENPGP, SEQ ID NO: 589), a P2A linker (GSGATNFSLLKQAGDVEENPGP, SEQ ID NO: 590), a E2A linker (GSGQCTNYALLKLAGDVESNPGP, SEQ ID NO: 591), an F2A linker (GSGVKQTLNFDLLKLAGDVESNPGP, SEQ ID NO: 592), etc.

[0147] In some embodiments, the linker polypeptide comprises a sequence having at least 80%, at least 85%, at least 90%, at least 91%, at least 92%, at least 93%, at least 94%, at least 95%, at least 96%, at least 97%, at least 98%, at least 99%, or 100% sequence identity to an amino acid sequence selected from SEQ ID NOS: 589-592. In some embodiments, the linker polypeptide comprises a sequence selected from SEQ ID NOS: 589-592.

[0148] Exemplary polynucleotides encoding chimeric polypeptides comprising a leader sequence, an antibody light chain, a linker polypeptide, a leader sequence, and an antibody heavy chain are provided as SEQ ID NOS: 593-595.

[0149] Two or More Polynucleotides

[0150] In some embodiments, a recombinant nucleic acid (e.g., recombinant herpes virus genome) of the present disclosure comprises two or more polynucleotides encoding an antibody. In some embodiments, the recombinant nucleic acid comprises a first polynucleotide encoding a polypeptide comprising an antibody heavy chain variable region (e.g., a full-length antibody heavy chain), and a second polynucleotide encoding a polypeptide comprising an antibody light chain variable region (e.g., a full-length antibody light chain). In some embodiments, the recombinant nucleic acid comprises two copies of a first polynucleotide encoding a polypeptide comprising an antibody heavy chain variable region (e.g., a full-length antibody heavy chain), and two copies of a second polynucleotide encoding a polypeptide comprising an antibody light chain variable region (e.g., a full-length antibody light chain). In some embodiments, the recombinant nucleic acid comprises two copies of a first polynucleotide encoding a polypeptide comprising an antibody heavy chain variable region (e.g., a full-length antibody heavy chain), and a single copy of a second polynucleotide encoding a polycistronic mRNA comprising a first and second ORF each encoding a polypeptide comprising an antibody light chain variable region (e.g., a full-length antibody light chain) separated by an IRES (e.g., any of the IRESs described herein). In some embodiments, the recombinant nucleic acid comprises a single copy of a first polynucleotide encoding a polycistronic mRNA comprising a first and second ORF each encoding a polypeptide comprising an antibody heavy chain variable region (e.g., a full-length antibody heavy chain) separated by an IRES (e.g., any of the IRESs described herein), and two copies of a second polynucleotide encoding a polypeptide comprising an antibody light chain variable region (e.g., a full-length antibody light chain).

[0151] In some embodiments, the recombinant nucleic acid comprises a first polynucleotide encoding a first antibody and a second polynucleotide encoding a second antibody. In some embodiments, the first and second antibody are the same. In some embodiments, the first and second antibodies are different.

[0152] Recombinant Nucleic Acids

[0153] In some embodiments, the present disclosure relates to recombinant nucleic acids comprising any one or more of the polynucleotides described herein. In some embodiments, the recombinant nucleic acid is a vector (e.g., an expression vector, a display vector, etc.). In some embodiments, the vector is a DNA vector or an RNA vector. Generally, vectors suitable to maintain, propagate, and/or express polynucleotides to produce one or more polypeptides in a subject may be used. Examples of suitable vectors may include, for example, plasmids, cosmids, episomes, transposons, and viral vectors (e.g., adenoviral vectors, adeno-associated viral vectors, vaccinia viral vectors, Sindbis-viral vectors, measles vectors, herpes viral vectors, lentiviral vectors, retroviral vectors, etc.). In some embodiments, the vector is a herpes viral vector. In some embodiments, the vector is capable of autonomous replication in a host cell. In some embodiments, the vector is incapable of autonomous replication in a host cell. In some embodiments, the vector can integrate into a host DNA. In some embodiments, the vector cannot integrate into a host DNA (e.g., is episomal). Methods of making vectors containing one or more polynucleotides of interest are well known to one of ordinary skill in the art, including, for example, by chemical synthesis, or by artificial manipulation of isolated segments of nucleic acids (e.g., by genetic engineering techniques).

[0154] In some embodiments, a recombinant nucleic acid of the present disclosure is a herpes simplex virus (HSV) amplicon. Herpes virus amplicons, including the structural features and methods of making the same, are generally known to one of ordinary skill in the art (see e.g., de Silva S. and Bowers W. “Herpes Virus Amplicon Vectors”. Viruses 2009, 1, 594-629). In some embodiments, the herpes simplex virus amplicon is an HSV-1 amplicon. In some embodiments, the herpes simplex virus amplicon is an HSV-1 hybrid amplicon. Examples of HSV-1 hybrid amplicons may include, but are not limited to, HSV/AAV hybrid amplicons, HSV/EBV hybrid amplicons, HSV/EBV/RV hybrid amplicons, and/or HSV/Sleeping Beauty hybrid amplicons. In some embodiments, the amplicon is an HSV/AAV hybrid amplicon. In some embodiments, the amplicon is an HSV/Sleeping Beauty hybrid amplicon.

[0155] In some embodiments, a recombinant nucleic acid of the present disclosure is a recombinant herpes virus genome. The recombinant herpes virus genome may be a recombinant genome from any member of the Herpesviridae family of DNA viruses known in the art, including, for example, a recombinant herpes simplex virus genome, a recombinant varicella zoster virus genome, a recombinant human cytomegalovirus genome, a recombinant herpesvirus 6A genome, a recombinant herpesvirus 6B genome, a recombinant herpesvirus 7 genome, a recombinant Kaposi's sarcoma-associated herpesvirus genome, and any combinations thereof or any derivatives thereof. In some embodiments, the recombinant herpes virus genome comprises more (e.g., one or more, two or more, three or more, four or more, five or more, six or more, seven or more, eight or more, nine or more, ten or more, etc.) inactivating mutations. In some embodiments, the one or more inactivating mutations are in one or more (e.g., one or more, two or more, three or more, four or more, five or more, six or more, seven or more, eight or more, nine or more, ten or more, etc.) herpes virus genes. In some embodiments, the recombinant herpes virus genome is attenuated (e.g., as compared to a corresponding, wild-type herpes virus genome). In some embodiments, the recombinant herpes virus genome is replication competent. In some embodiments, the recombinant herpes virus genome is replication defective.

[0156] In some embodiments, the recombinant nucleic acid is a recombinant herpes simplex virus (HSV) genome. In some embodiments, the recombinant herpes simplex virus genome is a recombinant type 1 herpes simplex virus (HSV-1) genome, a recombinant type 2 herpes simplex virus (HSV-2) genome, or any derivatives thereof. In some embodiments, the recombinant herpes simplex virus genome is a recombinant HSV-1 genome. In some embodiments, the recombinant herpes simplex virus genome is replication competent. In some embodiments, the recombinant herpes simplex virus genome is replication defective. In some embodiments, the recombinant herpes simplex virus genome comprises one or more (e.g., one or more, two or more, three or more, four or more, five or more, six or more, seven or more, eight or more, nine or more, ten or more, etc.) inactivating mutations. In some embodiments, the one or more inactivating mutations are in one or more (e.g., one or more, two or more, three or more, four or more, five or more, six or more, seven or more, eight or more, nine or more, ten or more, etc.) herpes simplex virus genes. As used herein, an “inactivating mutation” may refer to any mutation that results in the gene product (RNA or protein) having reduced, undetectable, or eliminated quantity and/or function (e.g., as compared to a corresponding sequence lacking the inactivating mutation). Examples of inactivating mutations may include, but are not limited to, deletions, insertions, point mutations, and rearrangements in transcriptional control sequences (promoters, enhancers, insulators, etc.) and/or coding sequences of a given gene or regulon. Any suitable method of measuring the quantity of a gene or regulon product known in the art may be used, including, for example, qPCR, Northern blots, RNAseq, western blots, ELISAs, etc.

[0157] In some embodiments, the recombinant herpes simplex virus genome comprises an inactivating mutation in at least one, at least two, at least three, at least four, at least five, at least six, at least seven, or all eight of the Infected Cell Protein (or Infected Cell Polypeptide) (ICP) 0, ICP4, ICP22, ICP27, ICP47, thymidine kinase (tk), Long Unique Region (UL) 41 and/or UL55 herpes simplex virus genes. In some embodiments, the recombinant herpes simplex virus genome does not comprise an inactivating mutation in the ICP34.5 (one or both copies) and/or ICP47 herpes simplex virus genes (e.g., to avoid production of an immune-stimulating virus). In some embodiments, the recombinant herpes simplex virus genome does not comprise an inactivating mutation in the ICP34.5 (one or both copies) herpes simplex virus gene. In some embodiments, the recombinant herpes simplex virus genome does not comprise an inactivating mutation in the ICP47 herpes simplex virus gene. In some embodiments, the recombinant herpes simplex virus genome does not comprise an inactivating mutation in the ICP34.5 (one or both copies) and ICP47 herpes simplex virus genes. In some embodiments, the recombinant herpes simplex virus genome is not oncolytic.

[0158] In some embodiments, the recombinant herpes simplex virus genome comprises an inactivating mutation in the ICP0 gene (one or both copies). In some embodiments, the recombinant herpes simplex virus genome comprises an inactivating mutation in the ICP0 gene (one or both copies), and further comprises an initiating mutation in the ICP4 (one or both copies) ICP22, ICP27, ICP47, UL41, and/or UL55 genes. In some embodiments, the recombinant herpes simplex virus genome comprises an inactivating mutation in the ICP0 gene (one or both copies), and an inactivating mutation in the ICP4 gene (one or both copies). In some embodiments, the recombinant herpes simplex virus genome comprises an inactivating mutation in the ICP0 gene (one or both copies), and an inactivating mutation in the ICP22 gene. In some embodiments, the recombinant herpes simplex virus genome comprises an inactivating mutation in the ICP0 gene (one or both copies), and an inactivating mutation in the UL41 gene. In some embodiments, the recombinant herpes simplex virus genome comprises an inactivating mutation in the ICP0 gene (one or both copies), an inactivating mutation in the ICP4 gene (one or both copies), and an inactivating mutation in the ICP22 gene. In some embodiments, the recombinant herpes simplex virus genome comprises an inactivating mutation in the ICP0 gene (one or both copies), an inactivating mutation in the ICP4 gene (one or both copies), and an inactivating mutation in the UL41 gene. In some embodiments, the recombinant herpes simplex virus genome comprises an inactivating mutation in the ICP0 gene (one or both copies), an inactivating mutation in the ICP22 gene, and an inactivating mutation in the UL41 gene. In some embodiments, the recombinant herpes simplex virus genome comprises an inactivating mutation in the ICP0 gene (one or both copies), an inactivating mutation in the ICP4 gene (one or both copies), an inactivating mutation in the ICP22 gene, and an inactivating mutation in the UL41 gene. In some embodiments, the inactivating mutation is a deletion of the coding sequence of the ICP0 (one or both copies), ICP4 (one or both copies), ICP22, and/or UL41 genes. In some embodiments, the recombinant herpes simplex virus genome further comprises an inactivating mutation in the ICP27, ICP47, and/or UL55 genes.

[0159] In some embodiments, the recombinant herpes simplex virus genome comprises an inactivating mutation in the ICP4 gene (one or both copies). In some embodiments, the recombinant herpes complex virus genome comprises an inactivating mutation in the ICP4 (one or both copies, and further comprises an inactivating mutation in the ICP0 (one or both copies), ICP22, ICP27, ICP47, UL41, and/or UL55 genes. In some embodiments, the recombinant herpes simplex virus genome comprises an inactivating mutation in the ICP4 gene (one or both copies), and an inactivating mutation in the ICP22 gene. In some embodiments, the recombinant herpes simplex virus genome comprises an inactivating mutation in the ICP4 gene (one or both copies), and an inactivating mutation in the UL41 gene. In some embodiments, the recombinant herpes simplex virus genome comprises an inactivating mutation in the ICP4 gene (one or both copies), an inactivating mutation in the ICP22 gene, and an inactivating mutation in the UL41 gene. In some embodiments, the inactivating mutation is a deletion of the coding sequence of the ICP4 (one or both copies), ICP22, and/or UL41 genes. In some embodiments, the recombinant herpes simplex virus genome further comprises an inactivating mutation in the ICP0, ICP27, ICP47, and/or UL55 genes.

[0160] In some embodiments, the recombinant herpes simplex virus genome comprises an inactivating mutation in the ICP22 gene. In some embodiments, the recombinant herpes simplex virus genome comprises an inactivating mutation in the ICP22 gene, and further comprises an inactivating mutation in the ICP0 (one or both copies), ICP4 (one or both copies), ICP27, ICP47, UL41, and/or UL55 genes. In some embodiments, the recombinant herpes simplex virus genome comprises an inactivating mutation in the ICP22 gene, and an inactivating mutation UL41 gene. In some embodiments, the inactivating mutation is a deletion of the coding sequence of the ICP22 and/or UL41 genes. In some embodiments, the recombinant herpes simplex virus genome further comprises an inactivating mutation in the ICP0 (one or both copies), ICP4 (one or both copies), ICP27, ICP47, and/or UL55 genes.

[0161] In some embodiments, the recombinant herpes simplex virus genome comprises an inactivating mutation in the ICP27 gene. In some embodiments, the recombinant herpes simplex virus genome comprises an inactivating mutation in the ICP27 gene, and further comprises an inactivating mutation in the ICP0 (one or both copies), ICP4 (one or both copies), ICP22, ICP47, UL41, and/or UL55 genes. In some embodiments, the inactivating mutation is a deletion of the coding sequence of the ICP27 gene.

[0162] In some embodiments, the recombinant herpes simplex virus genome comprises an inactivating mutation in the ICP47 gene. In some embodiments, the recombinant herpes simplex virus genome comprises an inactivating mutation in the ICP47 gene, and further comprises an inactivating mutation in the ICP0 (one or both copies), ICP4 (one or both copies), ICP22, ICP27, UL41, and/or UL55 genes. In some embodiments, the inactivating mutation is a deletion of the coding sequence of the ICP47 gene.

[0163] In some embodiments, the recombinant herpes simplex virus genome comprises an inactivating mutation in the UL41 gene. In some embodiments, the recombinant herpes simplex virus genome comprises an inactivating mutation in the UL41 gene, and further comprises an inactivating mutation in the ICP0 (one or both copies), ICP4 (one or both copies), ICP22, ICP27, ICP47, and/or UL55 genes. In some embodiments, the inactivating mutation is a deletion of the coding sequence of the UL41 gene.

[0164] In some embodiments, the recombinant herpes simplex virus genome comprises an inactivating mutation in the UL55 gene. In some embodiments, the recombinant herpes simplex virus genome comprises an inactivating mutation in the UL55 gene, and further comprises an inactivating mutation in the ICP0 (one or both copies), ICP4 (one or both copies), ICP22, ICP27, ICP47, and/or UL41 genes. In some embodiments, the inactivating mutation is a deletion of the coding sequence of the UL55 gene.

[0165] In some embodiments, the recombinant herpes simplex virus genome comprises an inactivating mutation in (e.g., a deletion of) the internal repeat (Joint) region comprising the internal repeat long (IRL) and internal repeat short (IRS) regions. In some embodiments, inactivation (e.g., deletion) of the Joint region eliminates one copy each of the ICP4 and ICP0 genes. In some embodiments, inactivation (e.g., deletion) of the Joint region further inactivates (e.g., deletes) the promoter for the ICP22 and ICP47 genes. If desired, expression of one or both of these genes can be restored by insertion of an immediate early promoter into the recombinant herpes simplex virus genome (see e.g., Hill et al. (1995). Nature 375(6530): 411-415; Goldsmith et al. (1998). J Exp Med 187(3): 341-348). Without wishing to be bound by theory, it is believed that inactivating (e.g., deleting) the Joint region may contribute to the stability of the recombinant herpes simplex virus genome and/or allow for the recombinant herpes simplex virus genome to accommodate more and/or larger transgenes.

[0166] In some embodiments, the recombinant herpes simplex virus genome comprises an inactivating mutation in the ICP4 (one or both copies), ICP22, and ICP27 genes. In some embodiments, the recombinant herpes simplex virus genome comprises an inactivating mutation in the ICP4 (one or both copies), ICP27, and UL55 genes. In some embodiments, the recombinant herpes simplex virus genome comprises an inactivating mutation in the ICP4 (one or both copies), ICP22, ICP27, ICP47, and UL55 genes. In some embodiments, the inactivating mutation in the ICP4 (one or both copies), ICP27, and/or UL55 genes is a deletion of the coding sequence of the ICP4 (one or both copies), ICP27, and/or UL55 genes. In some embodiments, the inactivating mutation in the ICP22 and ICP47 genes is a deletion in the promoter region of the ICP22 and ICP47 genes (e.g., the ICP22 and ICP47 coding sequences are intact but are not transcriptionally active). In some embodiments, the recombinant herpes simplex virus genome comprises a deletion in the coding sequence of the ICP4 (one or both copies), ICP27, and UL55 genes, and a deletion in the promoter region of the ICP22 and ICP47 genes. In some embodiments, the recombinant herpes simplex virus genome further comprises an inactivating mutation in the ICP0 (one or both copies) and/or UL41 genes.

[0167] In some embodiments, the recombinant herpes simplex virus genome comprises an inactivating mutation in the ICP0 (one or both copies) gene. In some embodiments, the recombinant herpes simplex virus genome comprises an inactivating mutation in the ICP0 (one or both copies) and ICP4 (one or both copies) genes. In some embodiments, the recombinant herpes simplex virus genome comprises an inactivating mutation in the ICP0 (one or both copies), ICP4 (one or both copies), and ICP22 genes. In some embodiments, the recombinant herpes simplex virus genome comprises an inactivating mutation in the ICP0 (one or both copies), ICP4 (one or both copies), ICP22, and ICP27 genes. In some embodiments, the recombinant herpes simplex virus genome comprises an inactivating mutation in the ICP0 (one or both copies), ICP4 (one or both copies), ICP22, ICP27 and UL55 genes. In some embodiments, the inactivating mutation in the ICP0 (one or both copies), ICP4 (one or both copies), ICP22, ICP27 and/or UL55 genes comprises a deletion of the coding sequence of the ICP0 (one or both copies), ICP4 (one or both copies), ICP22, ICP27 and/or UL55 genes. In some embodiments, the recombinant herpes simplex virus genome further comprises an inactivating mutation in the ICP47 and/or the UL41 genes.

[0168] In some embodiments, a recombinant herpes simplex virus genome comprises one or more polynucleotides of the present disclosure within one, two, three, four, five, six, seven or more viral gene loci. Examples of suitable viral loci may include, without limitation, the ICP0 (one or both copies), ICP4 (one or both copies), ICP22, ICP27, ICP47, tk, UL41 and UL55 herpes simplex viral gene loci. In some embodiments, a recombinant herpes simplex virus genome comprises one or more polynucleotides of the present disclosure within one or both of the viral ICP4 gene loci (e.g., a recombinant virus carrying a polynucleotide encoding an antibody (or a portion thereof) in one or both of the ICP4 loci). In some embodiments, a recombinant herpes simplex virus genome comprises one or more polynucleotides of the present disclosure within the viral ICP22 gene locus (e.g., a recombinant virus carrying a polynucleotide encoding an antibody (or a portion thereof) in the ICP22 locus). In some embodiments, a recombinant herpes simplex virus genome comprises one or more polynucleotides of the present disclosure within the viral UL41 gene locus (e.g., a recombinant virus carrying a polynucleotide encoding an antibody (or a portion thereof) in the UL41 locus). In some embodiments, a recombinant herpes simplex virus genome comprises one or more polynucleotides of the present disclosure within the viral ICP47 gene locus (e.g., a recombinant virus carrying a polynucleotide encoding an antibody (or a portion thereof) in the ICP47 locus). In some embodiments, a recombinant herpes simplex virus genome comprises one or more polynucleotides of the present disclosure within one or both of the viral ICP4 gene loci, and one or more polynucleotides of the present disclosure within the viral ICP22 gene locus (e.g., a recombinant virus carrying a polynucleotide encoding an antibody heavy chain in one or both of the ICP4 loci, and a polynucleotide encoding an antibody light chain in the ICP22 locus; a recombinant virus carrying a polynucleotide encoding an antibody heavy chain in one or both of the ICP4 loci, and a polynucleotide encoding a polycistronic mRNA encoding two copies of an antibody light chain in the ICP22 locus; etc.). In some embodiments, a recombinant herpes simplex virus genome comprises one or more polynucleotides of the present disclosure within one or both of the viral ICP4 gene loci, and one or more polynucleotides of the present disclosure within the viral UL41 gene locus (e.g., a recombinant virus carrying a polynucleotide encoding an antibody heavy chain in one or both of the ICP4 loci, and a polynucleotide encoding an antibody light chain in the UL41 locus; a recombinant virus carrying a polynucleotide encoding an antibody heavy chain in one or both of the ICP4 loci, and a polynucleotide encoding a polycistronic mRNA encoding two copies of an antibody light chain in the UL41 locus; etc.). In some embodiments, a recombinant herpes simplex virus genome comprises one or more polynucleotides of the present disclosure within the viral UL41 gene locus, and one or more polynucleotides of the present disclosure within the viral ICP22 gene locus (e.g., a recombinant virus carrying a polynucleotide encoding an antibody heavy chain in the UL41 locus, and a polynucleotide encoding an antibody light chain in the ICP22 locus; a recombinant virus carrying a polynucleotide encoding an antibody light chain in the UL41 locus, and a polynucleotide encoding an antibody heavy chain in the ICP22 locus; etc.). In some embodiments, a recombinant herpes simplex virus genome comprises one or more polynucleotides of the present disclosure within one or more of the viral ICP4 gene loci, one or more polynucleotides of the present disclosure within the viral ICP22 gene locus, and one or more polynucleotides of the present disclosure within the viral UL41 gene locus (e.g., a recombinant virus carrying a polynucleotide encoding an antibody heavy chain in one or both of the ICP4 loci, a polynucleotide encoding an antibody light chain in the ICP22 locus, and a polynucleotide encoding an antibody light chain in the UL41 locus; a recombinant virus carrying a polynucleotide encoding an antibody light chain in one or both of the ICP4 loci, a polynucleotide encoding an antibody heavy chain in the ICP22 locus, and a polynucleotide encoding an antibody heavy chain in the UL41 locus; etc.)

[0169] In some embodiments, the recombinant herpes virus genome (e.g., a recombinant herpes simplex virus genome) has been engineered to decrease or eliminate expression of one or more toxic herpes virus genes (such as one or both copies of the HSV ICP4 gene, the ICP22 gene, the UL41 gene, and/or the ICP27 gene). In some embodiments, the recombinant herpes virus genome (e.g., recombinant herpes simplex virus genome) has been engineered to reduce cytotoxicity of the recombinant genome (e.g., when introduced into a target cell) as compared to a corresponding wild-type herpes virus genome (e.g., a wild-type herpes simplex virus genome). In some embodiments, cytotoxicity (e.g., in human keratinocytes and/or fibroblast cells) of the recombinant virus genome (e.g., a recombinant herpes simplex virus genome) is reduced by at least about 5%, at least about 10%, at least about 15%, at least about 20%, at least about 25%, at least about 30%, at least about 35%, at least about 40%, at least about 45%, at least about 50%, at least about 55%, at least about 60%, at least about 65%, at least about 70%, at least about 75%, at least about 80%, at least about 85%, at least about 90%, at least about 95%, or at least about 99% as compared to a corresponding wild-type herpes virus genome (e.g., measuring the relative cytotoxicity of a recombinant ΔICP4 (one or both copies) herpes simplex virus genome vs. a wild-type herpes simplex virus genome in human keratinocytes or fibroblasts (primary cells or cell lines); measuring the relative cytotoxicity of a recombinant ΔICP4 (one or both copies)/ΔICP22 herpes simplex virus genome vs. a wild-type herpes simplex virus genome in human keratinocytes or fibroblasts (primary cells or cell lines); etc.). In some embodiments, cytotoxicity (e.g., in human keratinocytes and/or fibroblast cells) of the recombinant herpes virus genome (e.g., a recombinant herpes simplex virus genome) is reduced by at least about 1.5-fold, at least about 2-fold, at least about 3-fold, at least about 4-fold, at least about 5-fold, at least about 6-fold, at least about 7-fold, at least about 8-fold, at least about 9-fold, at least about 10-fold, at least about 15-fold, at least about 20-fold, at least about 25-fold, at least about 50-fold, at least about 75-fold, at least about 100-fold, at least about 250-fold, at least about 500-fold, at least about 750-fold, at least about 1000-fold, or more as compared to a corresponding wild-type herpes virus genome (e.g., measuring the relative cytotoxicity of a recombinant ΔICP4 (one or both copies) herpes simplex virus genome vs. a wild-type herpes simplex virus genome in human keratinocytes or fibroblasts (primary cells or cell lines); measuring the relative cytotoxicity of a recombinant ΔICP4 (one or both copies)/ΔICP22 herpes simplex virus genome vs. a wild-type herpes simplex virus genome in human keratinocytes or fibroblasts (primary cells or cell lines); etc.). Methods of measuring cytotoxicity are known to one of ordinary skill in the art, including, for example, through the use of vital dyes (formazan dyes), protease biomarkers, an MTT assay (or an assay using related tetrazolium salts such as XTT, MTS, water-soluble tetrazolium salts, etc.), measuring ATP content, etc.

[0170] In some embodiments, the recombinant herpes virus genome (e.g., a recombinant herpes simplex virus genome) has been engineered to reduce its impact on host cell proliferation after exposure of a target cell to the recombinant genome, as compared to a corresponding wild-type herpes virus genome (e.g., a wild-type herpes simplex virus genome). In some embodiments, the target cell is a human cell. In some embodiments, the target cell is a cell of the epidermis and/or dermis. In some embodiment, the target cell is a cell of the eye. In some embodiments, the target cell is a cell of the joint. In some embodiments, the target cell is a cell of the lungs. In some embodiments, host cell proliferation (e.g., of human keratinocytes and/or fibroblast cells) after exposure to the recombinant genome is at least about 5%, at least about 10%, at least about 15%, at least about 20%, at least about 25%, at least about 30%, at least about 35%, at least about 40%, at least about 45%, at least about 50%, at least about 55%, at least about 60%, at least about 65%, at least about 70%, at least about 75%, at least about 80%, at least about 85%, at least about 90%, at least about 95%, or at least about 99% faster as compared to host cell proliferation after exposure to a corresponding wild-type herpes virus genome (e.g., measuring the relative cellular proliferation after exposure to a recombinant ΔICP4 (one or both copies) herpes simplex virus genome vs. cellular proliferation after exposure to a wild-type herpes simplex virus genome in human keratinocytes or fibroblasts (primary cells or cell lines); measuring the relative cellular proliferation after exposure to a recombinant ΔICP4 (one or both copies)/ΔICP22 herpes simplex virus genome vs. cellular proliferation after exposure to a wild-type herpes simplex virus genome in human keratinocytes or fibroblasts (primary cells or cell lines); etc.). In some embodiments, host cell proliferation (e.g., of human keratinocytes and/or fibroblast cells) after exposure to the recombinant genome is at least about 1.5-fold, at least about 2-fold, at least about 3-fold, at least about 4-fold, at least about 5-fold, at least about 6-fold, at least about 7-fold, at least about 8-fold, at least about 9-fold, at least about 10-fold, at least about 15-fold, at least about 20-fold, at least about 25-fold, at least about 50-fold, at least about 75-fold, at least about 100-fold, at least about 250-fold, at least about 500-fold, at least about 750-fold, or at least about 1000-fold faster as compared to host cell proliferation after exposure to a corresponding wild-type herpes virus genome (e.g., measuring the relative cellular proliferation after exposure to a recombinant ΔICP4 (one or both copies) herpes simplex virus genome vs. cellular proliferation after exposure to a wild-type herpes simplex virus genome in human keratinocytes or fibroblasts (primary cells or cell lines); measuring the relative cellular proliferation after exposure to a recombinant ΔICP4 (one or both copies)/ΔICP22 herpes simplex virus genome vs. cellular proliferation after exposure to a wild-type herpes simplex virus genome in human keratinocytes or fibroblasts (primary cells or cell lines); etc.). Methods of measuring cellular proliferation are known to one of ordinary skill in the art, including, for example, through the use of a Ki67 cell proliferation assay, a BrdU cell proliferation assay, etc.

[0171] A vector (e.g., herpes viral vector) may include one or more polynucleotides of the present disclosure in a form suitable for expression of the polynucleotide in a host cell. Vectors may include one or more regulatory sequences operatively linked to the polynucleotide to be expressed (e.g., as described above).

[0172] In some embodiments, a recombinant nucleic acid (e.g., a recombinant herpes simplex virus genome) of the present disclosure comprises one or more of the polynucleotides described herein inserted in any orientation in the recombinant nucleic acid. If the recombinant nucleic acid comprises two or more polynucleotides described herein (e.g., two or more, three or more, etc.), the polynucleotides may be inserted in the same orientation or opposite orientations to one another. Without wishing to be bound be theory, incorporating two polynucleotides (e.g., two transgenes) into a recombinant nucleic acid (e.g., a vector) in an antisense orientation may help to avoid read-through and ensure proper expression of each polynucleotide.

### IV. Viruses

[0173] Certain aspects of the present disclosure relate to viruses comprising any of the polynucleotides and/or recombinant nucleic acids described herein. In some embodiments, the virus is capable of infecting one or more target cells of a subject (e.g., a human) In some embodiments, the virus is suitable for delivering the polynucleotides and/or recombinant nucleic acid into one or more target cells of a subject (e.g., a human subject). In some embodiments, the one or more target cells are one or more cells of the mucosa or skin (e.g., one or more cells of the epidermis, dermis, and/or subcutis). In some embodiments, the one or more cells are selected from keratinocytes, melanocytes, Langerhans cells, Merkel cells, mast cells, fibroblasts, and/or adipocytes. In some embodiments, the one or more cells are keratinocytes. In some embodiments, the one or more cells reside in the stratum corneum, stratum granulosum, stratum spinulosum, stratum basale, and/or basement membrane. In some embodiments, the one or more target cells are one or more epidermal cells. In some embodiments, the one or more target cells are one or more dermal cells. In some embodiments, the one or more target cells are one or more cells of a joint. In some embodiments, the one or more target cells are one or more cells of the eye. In some embodiments, the one or more target cells are one or more cells of the airway and/or lung.

[0174] Any suitable virus known in the art may be used, including, for example, adenovirus, adeno-associated virus, retrovirus, lentivirus, sendai virus, herpes virus (e.g., a herpes simplex virus), vaccinia virus, and/or any hybrid or derivative viruses thereof. In some embodiments, the virus is attenuated. In some embodiments, the virus is replication defective. In some embodiments, the virus is replication competent. In some embodiments, the virus has been modified to alter its tissue tropism relative to the tissue tropism of a corresponding unmodified, wild-type virus. In some embodiments, the virus has reduced cytotoxicity as compared to a corresponding wild-type virus. Methods of producing a virus comprising recombinant nucleic acids are well known to one of ordinary skill in the art.

[0175] In some embodiments, the virus is a member of the Herpesviridae family of DNA viruses, including, for example, a herpes simplex virus, a varicella zoster virus, a human cytomegalovirus, a herpesvirus 6A, a herpesvirus 6B, a herpesvirus 7, and a Kaposi's sarcoma-associated herpesvirus, etc. In some embodiments, the herpes virus is attenuated. In some embodiments, the herpes virus is replication defective. In some embodiments, the herpes virus is replication competent. In some embodiments, the herpes virus has reduced cytotoxicity as compared to a corresponding wild-type herpes virus. In some embodiments, the herpes virus is not oncolytic.

[0176] In some embodiments, the virus is a herpes simplex virus. Herpes simplex viruses comprising recombinant nucleic acids may be produced by a process disclosed, for example, in WO2015/009952 and/or WO2017/176336. In some embodiments, the herpes simplex virus is attenuated. In some embodiments, the herpes simplex virus is replication defective. In some embodiments, the herpes simplex virus is replication competent. In some embodiments, the herpes simplex virus is a herpes simplex type 1 virus (HSV-1), a herpes simplex type 2 virus (HSV-2), or any derivatives thereof. In some embodiments, the herpes simplex virus is a herpes simplex type 1 virus (HSV-1). In some embodiments, the HSV-1 is attenuated. In some embodiments, the HSV-1 is replication defective. In some embodiments, the HSV-1 is replication competent. In some embodiments, the HSV-1 has reduced cytotoxicity as compared to a corresponding wild-type HSV-1. In some embodiments, the HSV-1 is not oncolytic.

[0177] In some embodiments, the herpes simplex virus has been modified to alter its tissue tropism relative to the tissue tropism of an unmodified, wild-type herpes simplex virus. In some embodiments, the herpes simplex virus comprises a modified envelope. In some embodiments, the modified envelope comprises one or more (e.g., one or more, two or more, three or more, four or more, etc.) mutant herpes simplex virus glycoproteins. Examples of herpes simplex virus glycoproteins may include, but are not limited to, the glycoproteins gB, gC, gD, gH, and gL. In some embodiments, the modified envelope alters the herpes simplex virus tissue tropism relative to a wild-type herpes simplex virus

[0178] In some embodiments, the transduction efficiency (in vitro and/or in vivo) of a virus of the present disclosure (e.g., a herpes virus such as a herpes simplex virus) for one or more target cells (e.g., one or more human keratinocytes and/or fibroblasts) is at least about 25%. For example, the transduction efficiency of the virus for one or more target cells may be at least about 25%, at least about 30%, at least about 35%, at least about 40%, at least about 45%, at least about 50%, at least about 55%, at least about 60%, at least about 65%, at least about 70%, at least about 75%, at least about 80%, at least about 85%, at least about 90%, at least about 95%, at least about 99%, at least about 99.5%, or more. In some embodiments, the virus is a herpes simplex virus and the transduction efficiency of the virus for one or more target cells (e.g., one or more human keratinocytes and/or fibroblasts) is about 85% to about 100%. In some embodiments, the virus is a herpes simplex virus and the transduction efficiency of the virus for one or more target cells (e.g., one or more human keratinocytes and/or fibroblasts) is at least about 85%, at least about 86%, at least about 87%, at least about 88%, at least about 89%, at least about 90%, at least about 91%, at least about 92%, at least about 93%, at least about 94%, at least about 95%, at least about 96%, at least about 97%, at least about 98%, at least about 99%, or 100%. Methods of measuring viral transduction efficiency in vitro or in vivo are well known to one of ordinary skill in the art, including, for example, qPCR analysis, deep sequencing, western blotting, fluorometric analysis (such as fluorescent in situ hybridization (FISH), fluorescent reporter gene expression, immunofluorescence, FACS), etc.

### V. Pharmaceutical Compositions and Formulations

[0179] Certain aspects of the present disclosure relate to pharmaceutical compositions and formulations comprising any of the recombinant nucleic acids (e.g., a recombinant herpes virus genome) and/or viruses (e.g., a herpes virus comprising a recombinant genome) described herein, and a pharmaceutically acceptable excipient or carrier.

[0180] In some embodiments, the pharmaceutical composition or formulation comprises any one or more of the viruses (e.g., herpes viruses) as described herein. In some embodiments, the pharmaceutical composition or formulation comprises from about 10⁴ to about 10¹² plaque forming units (PFU)/mL of the virus. For example, the pharmaceutical composition or formulation may comprise from about 10⁴ to about 10¹², about 10⁵ to about 10¹², about 10⁶ to about 10¹², about 10⁷ to about 10¹², about 10⁸ to about 10¹², about 10⁹ to about 10¹², about 10¹⁰ to about 10¹², about 10¹¹ to about 10¹², about 10⁴ to about 10¹¹, about 10⁵ to about 10¹¹, about 10⁶ to about 10¹¹, about 10⁷ to about 10¹¹, about 10⁸ to about 10¹¹, about 10⁹ to about 10¹¹, about 10¹⁰ to about 10¹¹, about 10⁴ to about 10¹⁰, about 10⁵ to about 10¹⁰, about 10⁶ to about 10¹⁰, about 10⁷ to about 10¹⁰, about 10⁸ to about 10¹⁰, about 10⁹ to about 10¹⁰, about 10⁴ to about 10⁹, about 10⁵ to about 10⁹, about 10⁶ to about 10⁹, about 10⁷ to about 10⁹, about 10⁸ to about 10⁹, about 10⁴ to about 10⁸, about 10⁵ to about 10⁸, about 10⁶ to about 108, about 10⁷ to about 10⁸, about 10⁴ to about 10⁷, about 10⁵ to about 10⁷, about 10⁶ to about 10⁷, about 10⁴ to about 10⁶, about 10⁵ to about 10⁶, or about 10⁴ to about 10⁵ PFU/mL of the virus. In some embodiments, the pharmaceutical composition or formulation comprises about 10⁴, about 10⁵, about 10⁶, about 10⁷, about 10⁸, about 10⁹, about 10¹⁰, about 10¹¹, or about 10¹² PFU/mL of the virus.

[0181] Pharmaceutical compositions and formulations can be prepared by mixing the active ingredient(s) (such as a recombinant nucleic acid and/or a virus) having the desired degree of purity with one or more pharmaceutically acceptable carriers or excipients. Pharmaceutically acceptable carriers or excipients are generally nontoxic to recipients at the dosages and concentrations employed, and may include, but are not limited to: buffers (such as phosphate, citrate, acetate, and other organic acids); antioxidants (such as ascorbic acid and methionine); preservatives (such as octadecyldimethylbenzyl ammonium chloride, benzalkonium chloride, benzethonium chloride, phenol, butyl or benzyl alcohol, alkyl parabens, catechol, resorcinol, cyclohexanol, 3-pentanol, and m-cresol); amino acids (such as glycine, glutamine, asparagine, histidine, arginine, or lysine); low molecular weight (less than about 10 residues) polypeptides; proteins (such as serum albumin, gelatin, or immunoglobulins); polyols (such as glycerol, e.g., formulations including 10% glycerol); hydrophilic polymers (such as polyvinylpyrrolidone); monosaccharides, disaccharides, and other carbohydrates (including glucose, mannose, or dextrins); chelating agents (such as EDTA); sugars (such as sucrose, mannitol, trehalose, or sorbitol); salt-forming counter-ions (such as sodium); metal complexes (such as Zn-protein complexes); and/or non-ionic surfactants (such as polyethylene glycol (PEG)). A thorough discussion of pharmaceutically acceptable carriers is available in REMINGTON'S PHARMACEUTICAL SCIENCES (Mack Pub. Co., N.J. 1991).

[0182] In some embodiments, the pharmaceutical composition or formulation comprises one or more lipid (e.g., cationic lipid) carriers. In some embodiments, the pharmaceutical composition or formulation comprises one or more nanoparticle carriers. Nanoparticles are submicron (less than about 1000 nm) sized drug delivery vehicles that can carry encapsulated drugs (such as synthetic small molecules, proteins, peptides, cells, viruses, and nucleic acid-based biotherapeutics for rapid or controlled release. A variety of molecules (e.g., proteins, peptides, recombinant nucleic acids, etc.) can be efficiently encapsulated in nanoparticles using processes well known in the art. In some embodiments, a molecule “encapsulated” in a nanoparticle may refer to a molecule (such as a virus) that is contained within the nanoparticle or attached to and/or associated with the surface of the nanoparticle, or any combination thereof. Nanoparticles for use in the compositions or formulations described herein may be any type of biocompatible nanoparticle known in the art, including, for example, nanoparticles comprising poly(lactic acid), poly(glycolic acid), PLGA, PLA, PGA, and any combinations thereof (see e.g., Vauthier et al. Adv Drug Del Rev. (2003) 55: 519-48; US2007/0148074; US2007/0092575; US2006/0246139; U.S. Pat. Nos. 5,753,234; 7,081,483; and WO2006/052285).

[0183] In some embodiments, the pharmaceutically acceptable carrier or excipient may be adapted for or suitable for any administration route known in the art, including, for example, intravenous, intramuscular, subcutaneous, cutaneous, oral, intratracheal, sublingual, buccal, topical, transdermal, intradermal, intraperitoneal, intraorbital, intravitreal, subretinal, transmucosal, intraarticular, by implantation, by inhalation, intrathecal, intraventricular, and/or intranasal administration. In some embodiments, the pharmaceutically acceptable carrier or excipient is adapted for or suitable for topical, transdermal, subcutaneous, and/or intradermal administration. In some embodiments, the pharmaceutical composition or formulation is adapted for or suitable for topical, transdermal, subcutaneous, and/or intradermal administration. In some embodiments, the pharmaceutically acceptable carrier or excipient is adapted for or suitable for topical, transdermal, and/or intradermal administration. In some embodiments, the pharmaceutical composition or formulation is adapted for or suitable for topical, transdermal, and/or intradermal administration. In some embodiments, the pharmaceutically acceptable carrier or excipient is adapted for or suitable for oral, sublingual, nasal, intranasal, intratracheal, or buccal administration, or administration via inhalation. In some embodiments, the pharmaceutical composition or formulation is adapted for or suitable for oral, sublingual, nasal, intranasal, intratracheal, or buccal administration, or administration via inhalation. In some embodiments, the pharmaceutically acceptable carrier or excipient is adapted for or suitable for topical (to the eye), intravitreal, subretinal, or intraorbital administration. In some embodiments, the pharmaceutical composition or formulation is adapted for or suitable for topical (to the eye), intravitreal, subretinal, or intraorbital administration. In some embodiments, the pharmaceutically acceptable carrier or excipient is adapted for or suitable for intraarticular administration. In some embodiments, the pharmaceutical composition or formulation is adapted for or suitable for intraarticular administration.

[0184] Examples of carriers or excipients adapted for or suitable for use in pharmaceutical compositions or formulations of the present disclosure may include, but are not limited to, ointments, oils, pastes, creams, aerosols, suspensions, emulsions, fatty ointments, gels, powders, liquids, lotions, solutions, sprays, patches (e.g., transdermal patches or microneedle patches), adhesive strips, a microneedle or microneedle arrays, and inhalants. In some embodiments, the carrier or excipient (e.g., the pharmaceutically acceptable carrier or excipient) comprises one or more (e.g., one or more, two or more, three or more, four or more, five or more, etc.) of an ointment, oil, paste, cream, aerosol, suspension, emulsion, fatty ointment, gel, powder, liquid, lotion, solution, spray, adhesive strip, and an inhalant. In some embodiments, the carrier comprises a patch (e.g. a patch that adheres to the skin), such as a transdermal patch or a microneedle patch. In some embodiments, the carrier comprises a microneedle or microneedle array. Methods for making and using microneedle arrays suitable for composition delivery are generally known in the art (Kim Y. et al. “Microneedles for drug and vaccine delivery”. Advanced Drug Delivery Reviews 2012, 64 (14): 1547-68).

[0185] In some embodiments, the pharmaceutical composition or formulation further comprises one or more additional components. Examples of additional components may include, but are not limited to, binding agents (e.g., pregelatinized maize starch, polyvinylpyrrolidone or hydroxypropyl methylcellulose, etc.); fillers (e.g., lactose and other sugars, microcrystalline cellulose, pectin, gelatin, calcium sulfate, ethyl cellulose, polyacrylates or calcium hydrogen phosphate, etc.); lubricants (e.g., magnesium stearate, talc, silica, colloidal silicon dioxide, stearic acid, metallic stearates, hydrogenated vegetable oils, corn starch, polyethylene glycols, sodium benzoate, sodium acetate, etc.); disintegrants (e.g., starch, sodium starch glycolate, etc.); wetting agents (e.g., sodium lauryl sulphate, etc.); salt solutions; alcohols; polyethylene glycols; gelatin; lactose; amylase; magnesium stearate; talc; silicic acid; viscous paraffin; hydroxymethylcellulose; polyvinylpyrrolidone; sweetenings; flavorings; perfuming agents; colorants; moisturizers; sunscreens; antibacterial agents; agents able to stabilize polynucleotides or prevent their degradation, and the like. In some embodiments, the pharmaceutical composition or formulation comprises a hydroxypropyl methylcellulose gel. In some embodiments, the pharmaceutical composition or formulation comprises a phosphate buffer. In some embodiments, the pharmaceutical composition or formulation comprises glycerol (e.g., at about 1%, about 2%, about 3%, about 4%, about 5%, about 6%, about 7%, about 8%, about 9%, about 10%, about 15%, etc.).

[0186] Compositions and formulations (e.g., pharmaceutical compositions and formulations) to be used for in vivo administration are generally sterile. Sterility may be readily accomplished, e.g., by filtration through sterile filtration membranes.

[0187] In some embodiments, any of the recombinant nucleic acids, viruses, and/or pharmaceutical compositions or formulations described herein may be used to deliver one or more polynucleotides encoding an antibody (e.g., a therapeutic antibody) into one or more cells of a subject and/or may be used to express an antibody (e.g., a therapeutic antibody) in one or more tissues of a subject. In some embodiments, any of the recombinant nucleic acids, viruses, and/or pharmaceutical compositions or formulations described herein may be used in a therapy. In some embodiments, any of the recombinant nucleic acids, viruses, and/or pharmaceutical compositions or formulations may be used in the treatment of a disease or condition that would benefit from the administration of an antibody (e.g., a therapeutic antibody). In some embodiments, any of the recombinant nucleic acids, viruses, and/or pharmaceutical compositions or formulations described herein may be used in the treatment of one or more of psoriasis (e.g., chronic plaque psoriasis), atopic dermatitis, pyoderma gangrenosum, a blistering disease, pemphigus, pemphigus vulgaris, pemphigus foliaceus, an autoimmune bullous skin disorder, bullous pemphigoid, Behçet's disease, cancer (e.g., skin cancer, breast cancer, lymphoma, colorectal cancer, head and neck cancer, etc.), hidradenitis suppurativa, arthritis, rheumatoid arthritis, psoriatic arthritis, osteoarthritis, juvenile idiopathic arthritis, ankylosing spondylitis, axial spondylarthritis, reactive arthritis, enteropathic arthritis, autoimmune disease (e.g., multiple sclerosis, systemic lupus erythematosus, inflammatory bowel disease, Addison's disease, Graves' disease, Sjogren's syndrome, Hashimoto's thyroiditis, Myasthenia gravis, vasculitis, pernicious anemia, celiac disease, etc.), asthma, uveal melanoma, thyroid eye disease, infectious diseases, graft/tissue/organ rejection, and/or neurological diseases (e.g., Alzheimer's).

[0188] In some embodiments, any of the recombinant nucleic acids, viruses, and/or pharmaceutical compositions or formulations described herein may be used in the preparation or manufacture of a medicament. In some embodiments, any of the recombinant nucleic acids, viruses, and/or pharmaceutical compositions or formulations described herein may be used in the preparation or manufacture of a medicament useful for delivering one or more polynucleotides encoding an antibody (e.g., a therapeutic antibody) into one or more cells of a subject and/or may be used in the preparation or manufacture of a medicament useful for expressing an antibody (e.g., a therapeutic antibody) in one or more tissues of a subject. In some embodiments, any of the recombinant nucleic acids, viruses, and/or pharmaceutical compositions or formulations described herein may be used in the preparation or manufacture of a medicament useful for the treatment of a disease or condition that would benefit from the administration of an antibody (e.g., a therapeutic antibody). In some embodiments, any of the recombinant nucleic acids, viruses, and/or pharmaceutical compositions or formulations described herein may be used in the preparation or manufacture of a medicament useful for the treatment of one or more of psoriasis (e.g., chronic plaque psoriasis), atopic dermatitis, pyoderma gangrenosum, a blistering disease, pemphigus, pemphigus vulgaris, pemphigus foliaceus, an autoimmune bullous skin disorder, bullous pemphigoid, Behçet's disease, cancer (e.g., skin cancer, breast cancer, lymphoma, colorectal cancer, head and neck cancer, etc.), hidradenitis suppurativa, arthritis, rheumatoid arthritis, psoriatic arthritis, osteoarthritis, juvenile idiopathic arthritis, ankylosing spondylitis, axial spondylarthritis, reactive arthritis, enteropathic arthritis, autoimmune disease (e.g., multiple sclerosis, systemic lupus erythematosus, inflammatory bowel disease, Addison's disease, Graves' disease, Sjogren's syndrome, Hashimoto's thyroiditis, Myasthenia gravis, vasculitis, pernicious anemia, celiac disease, etc.), asthma, uveal melanoma, thyroid eye disease, infectious diseases, graft/tissue/organ rejection, and/or neurological diseases (e.g., Alzheimer's)

### VI. Methods

[0189] Certain aspects of the present disclosure relate to methods of delivering an antibody to a subject comprising administering to the subject an effective amount of any of the recombinant nucleic acids, viruses, medicaments, and/or compositions or formulations described herein. In some embodiments, the present disclosure relates to a method of locally delivering an antibody to one or more specific tissues of interest in a subject (e.g., tissues of the eye, tissues of the joints, tissues of the skin, tissues of the lungs, etc.) comprising administering to the subject an effective amount of any of the recombinant nucleic acids, viruses, medicaments, and/or compositions or formulations described herein. In some embodiments, the subject is a human.

[0190] In some embodiments, localized delivery of an antibody using a recombinant nucleic acid, virus, medicament, and/or pharmaceutical composition or formulation described herein reduces or eliminates systemic exposure to the antibody in the subject, e.g., as compared to a subject who received treatment with a purified antibody delivered via a traditional route of antibody administration (such as intravenous or subcutaneous administration). Methods of measuring systemic exposure to an antibody are well known to one of ordinary skill in the art, including, for example, by measuring the quantity of the antibody present in the blood or serum of a subject by ELISA. In some embodiments, use of a recombinant nucleic acid, virus, medicament, and/or pharmaceutical composition or formulation described herein for localized delivery of an antibody to a subject reduces or eliminates one or more side effects of the antibody, as compared to the side effects observed after systemic exposure of the subject to the same antibody (e.g., comparing one or more side effects of expressing the antibody in the subject after delivery (e.g., topical, intraarticular, intravitreal, etc.) of a recombinant nucleic acid, virus, medicament, and/or pharmaceutical composition or formulation described herein vs. the side effects after systemic (e.g., intravenous or subcutaneous) administration of the purified antibody). Examples of side effects resulting from systemic exposure to a therapeutic antibody include, for example, allergic reactions, chills, weakness, diarrhea, nausea, vomiting, rash, itching, high blood glucose levels, cough, constipation, shortness of breath, peripheral edema, headache, fever, muscle aches and pains, decreased appetite, increased triglyceride levels, insomnia, abdominal pain, back pain, dizziness, low blood pressure, anaphylaxis, infections, cancer, serum sickness, autoimmune thyroiditis, arterial and venous blood clots, congestive heart failure, bleeding, interstitial lung disease, hepatitis, gastrointestinal perforation, enterocolitis, mucositis, stomatitis, anemia, reduced white blood cell count, and/or hypothyroidism. Methods of assessing antibody side effects are well known to one of ordinary skill in the art.

[0191] In some embodiments, use of a recombinant nucleic acid, virus, medicament, and/or pharmaceutical composition or formulation described herein for localized delivery of an antibody to a subject improves one or more pharmacokinetic properties of the antibody at the site of interest (e.g., in the skin, in a joint, in the eye, etc.), as compared the pharmacokinetic properties of the antibody at the site of interest after systemic (e.g., intravenous) administration of the purified antibody. For a review of antibody pharmacokinetic properties, see e.g., Ryman and Meibohm “Pharmacokinetics of Monoclonal Antibodies”, CPT Pharmacometrics Syst Pharmacol. 2017 September; 6(9):576-588.

[0192] In some embodiments, use of a recombinant nucleic acid, virus, medicament, and/or pharmaceutical composition or formulation described herein for localized delivery of an antibody to a subject increases antibody tissue accessibility and/or infiltration at a site of interest (e.g., in the skin, in a joint, in the eye, in the airway or lungs, etc.), as compared to antibody tissue accessibility and/or infiltration at the site of interest after systemic (e.g., intravenous or subcutaneous) administration of the purified antibody. In some embodiments, use of a recombinant nucleic acid, virus, medicament, and/or pharmaceutical composition or formulation described herein for localized delivery of an antibody to a subject increases antibody concentration at the site of interest (e.g., in the skin, in a joint, in the eye, in the airway or lungs, etc.), as compared to antibody concentration at the site of interest after systemic (e.g., intravenous or subcutaneous) administration of the purified antibody. For example, in some embodiments, use of a recombinant nucleic acid, virus, medicament, and/or pharmaceutical composition or formulation described herein for localized delivery of an antibody increases antibody concentration at a site of interest (e.g., in the skin, in a joint, in the eye, in the airway or lungs, etc.) by at least about 25%, at least about 30%, at least about 40%, at least about 50%, at least about 50%, at least about 60%, at least about 70%, at least about 80%, at least about 90%, at least about 95%, at least about 99%, or more, as compared to antibody concentration at the site of interest after systemic (e.g., intravenous or subcutaneous) administration of the purified antibody. In some embodiments, use of a recombinant nucleic acid, virus, medicament, and/or pharmaceutical composition or formulation described herein for localized delivery of an antibody increases antibody concentration at a site of interest (e.g., in the skin, in a joint, in the eye, in the airway or lungs, etc.) by at least about 1.5-fold, at least about 2-fold, at least about 3-fold, at least about 4-fold, at least about 5-fold, at least about 6-fold, at least about 7-fold, at least about 8-fold, at least about 9-fold, at least about 10-fold, at least about 15-fold, at least about 20-fold, at least about 25-fold, at least about 50-fold, at least about 75-fold, at least about 100-fold, at least about 250-fold, at least about 500-fold, at least about 750-fold, or at least about 1000-fold, as compared to antibody concentration at the site of interest after systemic (e.g., intravenous or subcutaneous) administration of the purified antibody. Methods of measuring antibody concentration in a tissue sample are readily available to one of ordinary skill in the art, including, for example, by western blots, ELISAs, immunofluorescence, mass spectrometry, etc.

[0193] Other aspects of the present disclosure relate to methods of providing prophylactic, palliative, and/or therapeutic relief of one or more signs or symptoms of a disease in a subject comprising administering to the subject an effective amount of any of the recombinant nucleic acids, viruses, medicaments, and/or pharmaceutical compositions or formulations described herein. In some embodiments, the subject is a human. The disease may be any disease known in the art that may benefit from treatment with a therapeutic antibody, including, for example, psoriasis (e.g., chronic plaque psoriasis), atopic dermatitis, pyoderma gangrenosum, a blistering disease, pemphigus, pemphigus vulgaris, pemphigus foliaceus, an autoimmune bullous skin disorder, bullous pemphigoid, Behçet's disease, cancer (e.g., skin cancer, breast cancer, lymphoma, colorectal cancer, head and neck cancer, etc.), hidradenitis suppurativa, arthritis, rheumatoid arthritis, psoriatic arthritis, osteoarthritis, juvenile idiopathic arthritis, ankylosing spondylitis, axial spondylarthritis, reactive arthritis, enteropathic arthritis, autoimmune disease (e.g., multiple sclerosis, systemic lupus erythematosus, inflammatory bowel disease, Addison's disease, Graves' disease, Sjogren's syndrome, Hashimoto's thyroiditis, Myasthenia gravis, vasculitis, pernicious anemia, celiac disease, etc.), asthma, uveal melanoma, thyroid eye disease, infectious diseases, graft/tissue/organ rejection, neurological diseases (e.g., Alzheimer's), etc. In some embodiments, the disease not cancer.

[0194] The recombinant nucleic acids, viruses, medicaments, and/or pharmaceutical compositions or formulations described herein may be administered by any suitable method or route known in the art, including, without limitation, by oral administration, sublingual administration, buccal administration, intranasal administration, intratracheal administration, topical administration, rectal administration, via inhalation, transdermal administration, subcutaneous injection, intradermal injection, intravenous (IV) injection, intra-arterial injection, intramuscular injection, intracardiac injection, intraosseous injection, intraperitoneal injection, transmucosal administration, vaginal administration, intravitreal administration, intraorbital administration, subconjunctival administration (e.g., the use of subconjunctival depots), suprachoroidal administration, subretinal administration, intra-articular administration, peri-articular administration, local administration, epicutaneous administration, or any combinations thereof. The present disclosure thus encompasses methods of delivering any of the recombinant nucleic acids, viruses, medicaments, and/or pharmaceutical compositions or formulations described herein to an individual (or a specific site or tissue thereof).

[0195] In some embodiments, the recombinant nucleic acid, virus, medicament, and/or pharmaceutical composition or formulation used in the methods of the present disclosure is administered cutaneously, topically, transdermally, subcutaneously, intradermally, transmucosally, sublingually, nasally, buccally, intranasally, intratracheally, intravitreally, subconjunctivally, suprachoroidally, subretinally, intraarticularly, or via inhalation to the subject. In some embodiments, the recombinant nucleic acid, virus, medicament, and/or pharmaceutical composition or formulation is administered topically to the subject. In some embodiments, the recombinant nucleic acid, virus, medicament, and/or pharmaceutical composition or formulation is administered intradermally to the subject. In some embodiments, the recombinant nucleic acid, virus, medicament, and/or pharmaceutical composition or formulation is administered orally, sublingually, buccally, nasally, intranasally, intratracheally, or via inhalation to the subject. In some embodiments, the recombinant nucleic acid, virus, medicament, and/or pharmaceutical composition or formulation is administered intraarticularly to the subject. In some embodiments, the recombinant nucleic acid, virus, medicament, and/or pharmaceutical composition or formulation is administered intraorbitally, intravitreally, subconjunctivally, suprachoroidally, subretinally, or topically (to the eye) of the subject.

[0196] In some embodiments, the recombinant nucleic acid, virus, medicament, and/or pharmaceutical composition or formulation is administered once to the subject. In some embodiments, the recombinant nucleic acid, virus, medicament, and/or pharmaceutical composition or formulation is administered at least twice (e.g., at least 2 times, at least 3 times, at least 4 times, at least 5 times, at least 10 times, etc.) to the subject. In some embodiments, at least about 1 hour (e.g., at least about 1 hour, at least about 6 hours, at least about 12 hours, at least about 18 hours, at least about 1 day, at least about 2 days, at least about 3 days, at least about 4 days, at least about 5 days, at least about 6 days, at least about 7 days, at least about 15 days, at least about 20 days, at least about 30 days, at least about 40 days, at least about 50 days, at least about 60 days, at least about 70 days, at least about 80 days, at least about 90 days, at least about 100 days, at least about 120 days, etc.) pass between administrations (e.g., between the first and second administrations, between the second and third administrations, etc.). In some embodiments, the recombinant nucleic acid, virus, medicament, and/or pharmaceutical composition or formulation is administered one, two, three, four, five or more times per day to the subject. In some embodiments, the recombinant nucleic acid, virus, medicament and/or pharmaceutical composition or formulation is administered to one or more affected and/or unaffected areas of the subject.

[0197] Other aspects of the present disclosure relate to a method of administering an antibody to the epidermis and/or dermis of a subject comprising topically, transdermally, and/or intradermally administering an effective amount of any of the recombinant nucleic acids, viruses, medicaments, and/or pharmaceutical compositions or formulations described herein to the subject. In some embodiments, the subject is not exposed to the antibody systemically (e.g., it is not detectable in the serum). In some embodiments, the recombinant nucleic acid, virus, medicament, and/or pharmaceutical composition or formulation is administered topically. In some embodiments, the recombinant nucleic acid, virus, medicament, and/or pharmaceutical composition or formulation is administered intradermally. In some embodiments, the subject is a human. In some embodiments, the subject suffers from a disease or disorder of the skin. In some embodiments, the subject suffers from one or more of psoriasis, atopic dermatitis, pyoderma gangrenosum, a blistering disease, pemphigus, pemphigus vulgaris, pemphigus foliaceus, an autoimmune bullous skin disorder, bullous pemphigoid, Behçet's disease, skin cancer, and/or hidradenitis suppurativa. In some embodiments, the disease or disorder is not cancer (e.g., is not skin cancer).

[0198] In some embodiments, one or more portions of the skin of the subject is abraded or made more permeable prior to treatment with a recombinant nucleic acid, virus, medicament, and/or pharmaceutical composition or formulation described herein. Any suitable method of abrading the skin or increasing skin permeability known in the art may be used, including, for example, use of a dermal roller, repeated use of adhesive strips to remove layers of skin cells (tape stripping), scraping with a scalpel or blade, use of sandpaper, use of chemical permeation enhancers (e.g., cell-penetrating polypeptides) or electrical energy, use of sonic or ultrasonic energy, use of light (e.g., laser) energy, use of micron-sized needles or blades with a length suitable to pierce but not completely pass through the epidermis, etc.

[0199] Other aspects of the present disclosure relate to a method of administering an antibody to the mucosa of a subject comprising topically, transmucosally, orally, sublingually, nasally, intranasally, intratracheally, via inhalation, or buccally administering an effective amount of any of the recombinant nucleic acids, viruses, medicaments, and/or pharmaceutical compositions or formulations described herein to the subject. In some embodiments, the subject is not exposed to the antibody systemically (e.g., it is not detectable in the serum). In some embodiments, the recombinant nucleic acid, virus, medicament, and/or composition is administered sublingually. In some embodiments, the recombinant nucleic acid, virus, medicament, and/or pharmaceutical composition or formulation is administered topically. In some embodiments, the recombinant nucleic acid, virus, medicament, and/or pharmaceutical composition or formulation is administered buccally. In some embodiments, the recombinant nucleic acid, virus, medicament, and/or pharmaceutical composition or formulation is administered intranasally. In some embodiments, the recombinant nucleic acid, virus, medicament, and/or pharmaceutical composition or formulation is administered via inhalation. In some embodiments, the subject is a human.

[0200] Other aspects of the present disclosure relate to a method of administering an antibody to the airway or lungs of a subject comprising orally, sublingually, nasally, intranasally, intratracheally, via inhalation, or buccally administering an effective amount of any of the recombinant nucleic acids, viruses, medicaments, and/or pharmaceutical compositions or formulations described herein to the subject. In some embodiments, the subject is not exposed to the antibody systemically (e.g., it is not detectable in the serum). In some embodiments, the recombinant nucleic acid, virus, medicament, and/or composition is administered sublingually. In some embodiments, the recombinant nucleic acid, virus, medicament, and/or pharmaceutical composition or formulation is administered buccally. In some embodiments, the recombinant nucleic acid, virus, medicament, and/or pharmaceutical composition or formulation is administered intranasally. In some embodiments, the recombinant nucleic acid, virus, medicament, and/or pharmaceutical composition or formulation is administered via inhalation. In some embodiments, the subject is a human. In some embodiments, the subject suffers from a disease or disorder of the airway or lungs (e.g., a respiratory disease such as asthma, lung cancer, respiratory infections, chronic obstructive pulmonary disease, idiopathic pulmonary fibrosis, etc.).

[0201] Other aspects of the present disclosure relate to a method of administering an antibody to one or more joints of a subject comprising intraarticularly administering an effective amount of any of the recombinant nucleic acids, viruses, medicaments, and/or pharmaceutical compositions or formulations described herein to the subject. In some embodiments, the subject is not exposed to the antibody systemically (e.g., it is not detectable in the serum). In some embodiments, the subject suffers from a disease of the joints. In some embodiments, the subject suffers from one or more of arthritis, rheumatoid arthritis, psoriatic arthritis, osteoarthritis, juvenile idiopathic arthritis, ankylosing spondylitis, axial spondylarthritis, reactive arthritis, and/or enteropathic arthritis. In some embodiments, the subject is a human.

[0202] Other aspects of the present disclosure relate to a method of administering an antibody to one or both eyes of a subject comprising topically, intravitreally, intraorbitally, subconjunctivally, subretinally, or suprachoroidally administering an effective amount of any of the recombinant nucleic acids, viruses, medicaments, and/or pharmaceutical compositions or formulations described herein to the subject. In some embodiments, the subject is not exposed to the antibody systemically (e.g., it is not detectable in the serum). In some embodiments, the subject suffers from a disease of the eye. In some embodiments, the subject suffers from an autoimmune disease that effects the eyes. In some embodiments, the subject suffers from uveal melanoma or thyroid eye disease. In some embodiments, the subject is a human.

### VII. Host Cells

[0203] Certain aspects of the present disclosure relate to one or more host cells comprising any of the recombinant nucleic acids described herein. Any suitable host cell (prokaryotic or eukaryotic) known in the art may be used, including, for example: prokaryotic cells including eubacteria, such as Gram-negative or Gram-positive organisms, for example Enterobacteriaceae such as Escherichia (e.g., E. coli), Enterobacter, Erminia, Klebsiella, Proteus, Salmonella (e.g., S. typhimurium), Serratia (e.g., S. marcescans), and Shigella, as well as Bacilli such as B. subtilis and B. licheniformis; fungal cells (e.g., S. cerevisiae); insect cells (e.g., S2 cells, etc.); and mammalian cells, including monkey kidney CV1 line transformed by SV40 (COS-7, ATCC CRL 1651), human embryonic kidney line (293 or 293 cells subcloned for growth in suspension culture), baby hamster kidney cells (BHK, ATCC CCL 10), mouse Sertoli cells (TM4), monkey kidney cells (CV1 ATCC CCL 70), African green monkey kidney cells (VERO-76, ATCC CRL-1587), human cervical carcinoma cells (HELA, ATCC CCL 2), canine kidney cells (MDCK, ATCC CCL 34), buffalo rat liver cells (BRL 3A, ATCC CRL 1442), human lung cells (W138, ATCC CCL 75), human liver cells (Hep G2, HB 8065), mouse mammary tumor (MMT 060562, ATCC CCL51), TRI cells, MRC 5 cells, FS4 cells, human hepatoma line (Hep G2), Chinese hamster ovary (CHO) cells, including DHFR″ CHO cells, and myeloma cell lines such as NS0 and Sp2/0. In some embodiments, the host cell is a human or non-human primate cell. In some embodiments, the host cells are cells from a cell line. Examples of suitable host cells or cell lines may include, but are not limited to, 293, HeLa, SH-Sy5y, Hep G2, CACO-2, A549, L929, 3T3, K562, CHO-K1, MDCK, HUVEC, Vero, N20, COS-7, PSN1, VCaP, CHO cells, and the like.

[0204] In some embodiments, the recombinant nucleic acid is a herpes simplex viral vector. In some embodiments, the recombinant nucleic acid is a herpes simplex virus amplicon. In some embodiments, the recombinant nucleic acid is an HSV-1 amplicon or HSV-1 hybrid amplicon. In some embodiments, a host cell comprising a helper virus is contacted with an HSV-1 amplicon or HSV-1 hybrid amplicon described herein, resulting in the production of a virus comprising one or more recombinant nucleic acids described herein. In some embodiments, the virus is collected from the supernatant of the contacted host cell. Methods of generating virus by contacting host cells comprising a helper virus with an HSV-1 amplicon or HSV-1 hybrid amplicon are known in the art

[0205] In some embodiments, the host cell is a complementing host cell. In some embodiments, the complementing host cell expresses one or more genes that are inactivated in any of the viral vectors described herein. In some embodiments, the complementing host cell is contacted with a recombinant herpes viral genome (e.g., a recombinant herpes simplex viral genome) described herein. In some embodiments, contacting a complementing host cell with a recombinant herpes virus genome results in the production of a herpes virus comprising one or more recombinant nucleic acids described herein. In some embodiments, the virus is collected from the supernatant of the contacted host cell. Methods of generating virus by contacting complementing host cells with a recombinant herpes simplex virus are generally described in WO2015/009952 and/or WO2017/176336.

### VIII. Articles of Manufacture or Kits

[0206] Certain aspects of the present disclosure relate to an article of manufacture or a kit comprising any of the recombinant nucleic acids, viruses, medicaments, and/or pharmaceutical compositions or formulations) described herein. In some embodiments, the article of manufacture or kit comprises a package insert comprising instructions for administering the recombinant nucleic acid, virus, medicament, and/or pharmaceutical composition or formulation (e.g., to provide a method of locally delivering an antibody to one or more tissues of the subject (such as the epidermis and/or dermis of a subject) in need thereof by administering the recombinant nucleic acid, virus, medicament, and/or pharmaceutical composition or formulation).

[0207] Suitable containers for the recombinant nucleic acids, viruses, medicaments and/or pharmaceutical compositions or formulations may include, for example, bottles, vials, bags, tubes, and syringes. The container may be formed from a variety of materials such as glass, plastic (such as polyvinyl chloride or polyolefin), or metal alloy (such as stainless steel or hastelloy). In some embodiments, the container comprises a label on, or associated with the container, wherein the label indicates directions for use. The article of manufacture or kit may further include other materials desirable from a commercial and user standpoint, including other buffers, diluents, filters, needles, syringes, package inserts, and the like.

### IX. Enumerated Embodiments

[0208] Embodiment 1: a recombinant herpes simplex virus (HSV) genome comprising one or more polynucleotides encoding an antibody.

[0209] Embodiment 2: the recombinant genome of embodiment 1, wherein the antibody is an antibody fragment.

[0210] Embodiment 3: the recombinant genome of embodiment 2, wherein the antibody fragment is a Fab, Fab′, Fab′-SF, F(ab′)2, Fv, scFv, or scFv-Fc fragment.

[0211] Embodiment 4: the recombinant genome of embodiment 1, wherein the antibody is a full-length antibody.

[0212] Embodiment 5: the recombinant genome of any one of embodiments 1-4, wherein the antibody is a murine antibody, a chimeric antibody, a humanized antibody, a human antibody, a monoclonal antibody, or a multispecific antibody.

[0213] Embodiment 6: the recombinant genome of any one of embodiments 1-5, wherein the antibody is an IgA, IgD, IgE, IgG, or IgM antibody.

[0214] Embodiment 7: the recombinant genome of any one of embodiments 1-6, wherein the antibody is an IgG antibody.

[0215] Embodiment 8: the recombinant genome of embodiment 7, wherein the IgG antibody is an IgG1, IgG2, IgG3, or IgG4 antibody.

[0216] Embodiment 9: the recombinant genome of any one of embodiments 1-8, wherein the antibody is an agonist antibody.

[0217] Embodiment 10: the recombinant genome of any one of embodiments 1-8, wherein the antibody is an antagonist antibody.

[0218] Embodiment 11: the recombinant genome of any one of embodiments 1-10, wherein the antibody comprises a heavy chain variable region comprising an HVR-H1, an HVR-H2, and an HVR-H3, wherein the HVR-H1 comprises a sequence selected from the group consisting of SEQ ID NOS: 1-59, the HVR-H2 comprises a sequence selected from the group consisting of SEQ ID NOS: 60-122, and/or the HVR-H3 comprises a sequence selected from the group consisting of SEQ ID NOS: 123-185.

[0219] Embodiment 12: the recombinant genome of embodiment 11, wherein the heavy chain variable region comprises a sequence having at least 85%, at least 90%, at least 91%, at least 92%, at least 93%, at least 94%, at least 95%, at least 96%, at least 97%, at least 98%, at least 99%, or 100% sequence identity to a sequence selected from the group consisting of SEQ ID NOS: 355-419.

[0220] Embodiment 13: the recombinant genome of any one of embodiments 1-12, wherein the antibody comprises a light chain variable region comprising an HVR-L1, an HVR-L2, and an HVR-L3, wherein the HVR-L1 comprises a sequence selected from the group consisting of SEQ ID NOS: 186-242, the HVR-L2 comprises a sequence selected from the group consisting of SEQ ID NOS: 243-294, and/or the HVR-L3 comprises a sequence selected from the group consisting of SEQ ID NOS: 295-354.

[0221] Embodiment 14: the recombinant genome of embodiment 13, wherein the light chain variable region comprises a sequence having at least 85%, at least 90%, at least 91%, at least 92%, at least 93%, at least 94%, at least 95%, at least 96%, at least 97%, at least 98%, at least 99%, or 100% sequence identity to a sequence selected from SEQ ID NOS: 420-482.

[0222] Embodiment 15: the recombinant genome of any one of embodiments 1-14, wherein the recombinant genome is a recombinant HSV-1 genome, a recombinant HSV-2 genome, or any derivatives thereof.

[0223] Embodiment 16: the recombinant genome of any one of embodiments 1-15, wherein the recombinant genome comprises an inactivating mutation in a herpes simplex virus gene.

[0224] Embodiment 17: the recombinant genome of embodiment 16, wherein the herpes simplex virus gene is selected from the group consisting of Infected Cell Protein (ICP) 0, ICP4, ICP22, ICP27, ICP47, thymidine kinase (tk), Long Unique Region (UL) 41, and UL55.

[0225] Embodiment 18: the recombinant genome of embodiment 17, wherein the recombinant genome comprises an inactivating mutation in one or both copies of the ICP4 gene.

[0226] Embodiment 19: the recombinant genome of embodiment 17 or 18, wherein the recombinant genome comprises an inactivating mutation in the ICP22 gene.

[0227] Embodiment 20: the recombinant genome of any one of embodiments 17-19, wherein the recombinant genome comprises an inactivating mutation in the UL41 gene.

[0228] Embodiment 21: the recombinant genome of any one of embodiments 17-20, wherein the recombinant genome comprises an inactivating mutation in the ICP0 gene.

[0229] Embodiment 22: the recombinant genome of any one of embodiments 17-21, wherein the recombinant genome comprises an inactivating mutation in the ICP27 gene.

[0230] Embodiment 23: the recombinant genome of any one of embodiments 16-22, wherein the inactivating mutation is a deletion of the coding sequence of the gene(s).

[0231] Embodiment 24: the recombinant genome of any one of embodiments 1-23, wherein the recombinant genome has reduced cytotoxicity when introduced into a target cell as compared to a wild-type herpes simplex virus genome.

[0232] Embodiment 25: the recombinant genome of embodiment 24, wherein the target cell is a human cell.

[0233] Embodiment 26: the recombinant genome of embodiment 24 or 25, wherein the target cell is a keratinocyte or fibroblast.

[0234] Embodiment 27: the recombinant genome of any one of embodiments 1-2, wherein the recombinant genome comprises the one or more polynucleotides within one or more viral gene loci.

[0235] Embodiment 28: the recombinant genome of embodiment 27, wherein the recombinant genome comprises one or more polynucleotides within one or both of the ICP4 viral gene loci.

[0236] Embodiment 29: the recombinant genome of embodiment 27 or 28, wherein the recombinant genome comprises the one or more polynucleotides within the ICP22 viral gene locus.

[0237] Embodiment 30: the recombinant genome of any one of embodiments 27-29, wherein the recombinant genome comprises the one or more polynucleotides within the UL41 viral gene locus.

[0238] Embodiment 31: a herpes simplex virus (HSV) comprising the recombinant genome of any one of embodiments 1-30.

[0239] Embodiment 32: the virus of embodiment 31, wherein the HSV is replication competent.

[0240] Embodiment 33: the virus of embodiment 31, wherein the HSV is replication defective.

[0241] Embodiment 34: the virus of any one of embodiments 31-33, wherein the HSV has reduced cytotoxicity as compared to a wild-type herpes simplex virus.

[0242] Embodiment 35: the virus of any one of embodiments 31-34, wherein the HSV is a herpes simplex type 1 virus, a herpes simplex type 2 virus, or any derivatives thereof.

[0243] Embodiment 36: a pharmaceutical composition comprising the recombinant genome of any one of embodiments 1-30 or the virus of any one of embodiments 31-35 and a pharmaceutically acceptable excipient.

[0244] Embodiment 37: the pharmaceutical composition of embodiment 36, wherein the pharmaceutically acceptable excipient is suitable for topical, transdermal, subcutaneous, intradermal, transmucosal, sublingual, nasal, buccal, intraorbital, intravitreal, subconjunctival, suprachoroidal, intraarticular, and/or inhaled administration.

[0245] Embodiment 38: the pharmaceutical composition of embodiment 36 or 37, wherein the pharmaceutically acceptable excipient is suitable for topical administration.

[0246] Embodiment 39: the pharmaceutical composition of any one of embodiments 36-38, wherein the pharmaceutically acceptable excipient comprises a hydroxypropyl methylcellulose gel.

[0247] Embodiment 40: the pharmaceutical composition of any one of embodiments 36-39, wherein the pharmaceutically acceptable excipient comprises a phosphate buffer.

[0248] Embodiment 41: the pharmaceutical composition of any one of embodiments 36-40, wherein the pharmaceutically acceptable excipient comprises glycerol.

[0249] Embodiment 42: the pharmaceutical composition of any one of embodiments 36-41, wherein the pharmaceutically acceptable excipient comprises a lipid carrier.

[0250] Embodiment 43: the pharmaceutical composition of any one of embodiments 36-42, wherein the pharmaceutically acceptable excipient comprises a nanoparticle carrier.

[0251] Embodiment 44: a method of administering an antibody to a subject, the method comprises administering to the subject an effective amount of the virus of any one of embodiments 31-35 or the pharmaceutical composition of any one of embodiments 36-43.

[0252] Embodiment 45: a method of providing prophylactic, palliative, and/or therapeutic relief of one or more signs or symptoms of a disease in a subject, the method comprising administering to the subject an effective amount of the virus of any one of embodiments 31-35 or the pharmaceutical composition of any one of embodiments 36-43.

[0253] Embodiment 46: the method of embodiment 44 or 45, wherein the virus or composition is administered topically, transdermally, subcutaneously, intradermally, transmucosally, sublingually, nasally, buccally, intravitreally, subconjunctivally, suprachoroidally, intraarticularly, or via inhalation.

[0254] Embodiment 47: the method of embodiment 45 or 46, wherein the disease is selected from the group consisting of psoriasis, atopic dermatitis, pyoderma gangrenosum, a blistering disease, pemphigus, pemphigus vulgaris, pemphigus foliaceus, an autoimmune bullous skin disorder, bullous pemphigoid, Behçet's disease, cancer, hidradenitis suppurativa, arthritis, rheumatoid arthritis, psoriatic arthritis, osteoarthritis, juvenile idiopathic arthritis, ankylosing spondylitis, axial spondylarthritis, reactive arthritis, enteropathic arthritis, autoimmune disease, melanoma, uveal melanoma, and thyroid eye disease.

[0255] Embodiment 48: a method of administering an antibody to the epidermis and/or dermis of a subject, the method comprising topically transdermally or intradermally administering to the subject an effective amount of the virus of any one of embodiments 31-35 or the pharmaceutical composition of any one of embodiments 36-43.

[0256] Embodiment 49: the method of embodiment 48, wherein the skin of the subject is abraded prior to administration.

[0257] Embodiment 50: a method of administering an antibody to the mucosa of a subject, the method comprising topically, transmucosally, sublingually, nasally, or buccally administering to the subject an effective amount of the virus of any one of embodiments 31-35 or the pharmaceutical composition of any one of embodiments 36-43.

[0258] Embodiment 51: a method of administering an antibody to one or more joints of a subject, the method comprising intraarticularly administering to the subject an effective amount of the virus of any one of embodiments 31-35 or the pharmaceutical composition of any one of embodiments 36-43.

[0259] Embodiment 52: a method of administering an antibody to one or both eyes of a subject, the method comprising topically, intraorbitally, intravitreally, subconjunctivally, or suprachoroidally administering to the subject an effective amount of the virus of any one of embodiments 31-35 or the pharmaceutical composition of any one of embodiments 36-43.

[0260] Embodiment 53: the method of any one of embodiments 44-52, wherein the subject is a human.

[0261] Embodiment 54: the method of any one of embodiments 44-53, wherein the subject is not exposed to the antibody systemically.

[0262] The specification is considered to be sufficient to enable one skilled in the art to practice the present disclosure. Various modifications of the present disclosure in addition to those shown and described herein will become apparent to those skilled in the art from the foregoing description and fall within the scope of the appended claims.

### EXAMPLES

[0263] The present disclosure will be more fully understood by reference to the following examples. It should not, however, be construed as limiting the scope of the present disclosure. It is understood that the examples and embodiments described herein are for illustrative purposes only and that various modifications or changes in light thereof will be suggested to persons skilled in the art, and are to be included within the spirit and purview of this application and scope of the appended claims.

### Example 1: Modified Herpes Simplex Virus Vectors Encoding Antibodies

[0264] To make modified herpes simplex virus genome vectors capable of expressing antibodies in a target mammalian cell (such as a human keratinocyte or fibroblast), a herpes simplex virus genome (FIG. 1A) is first modified to inactivate one or more herpes simplex virus genes. Such modifications may decrease the toxicity of the genome in mammalian cells. Next, variants of these modified/attenuated recombinant viral constructs are generated such that they carry one or more polynucleotides encoding the desired antibody. These variants include: 1) a recombinant ΔICP4/ΔICP22-modified HSV-1 genome comprising expression cassettes containing the coding sequence of an antibody fragment (e.g., an scFv-Fc) under the control of a heterologous promoter integrated at each ICP4 locus (FIG. 1B); 2) a recombinant ΔICP4-modified HSV-1 genome comprising expression cassettes containing the coding sequence of an antibody fragment (e.g., an scFv-Fc) under the control of a heterologous promoter integrated at each ICP4 locus (FIG. 1C); 3) a recombinant ΔICP4/ΔICP22-modified HSV-1 genome comprising expression cassettes containing the coding sequence of an antibody heavy chain under the control of a first heterologous promoter and the coding sequence of an antibody light chain under the control of a second heterologous promoter on the same strand of DNA integrated at each ICP4 locus (FIG. 1D); 4) a recombinant ΔICP4-modified HSV-1 genome comprising expression cassettes containing the coding sequence of an antibody heavy chain under the control of a first heterologous promoter and the coding sequence of an antibody light chain under the control of a second heterologous promoter on the same strand of DNA integrated at each ICP4 locus (FIG. 1E); 5) a recombinant ΔICP4/ΔICP22-modified HSV-1 genome comprising expression cassettes containing the coding sequence of an antibody heavy chain under the control of a first heterologous promoter and the coding sequence of an antibody light chain under the control of a second heterologous promoter on opposite strands of DNA integrated at each ICP4 locus (FIG. 1F); 6) a recombinant ΔICP4-modified HSV-1 genome comprising expression cassettes containing the coding sequence of an antibody heavy chain under the control of a first heterologous promoter and the coding sequence of an antibody light chain under the control of a second heterologous promoter on opposite strands of DNA integrated at each ICP4 locus (FIG. 1G); 7) a recombinant ΔICP4/ΔICP22-modified HSV-1 genome comprising expression cassettes encoding a polycistronic mRNA under the control of a heterologous promoter integrated at each of the ICP4 loci, where the polycistronic mRNA contains the coding sequence of an antibody heavy and light chain separated by an internal ribosomal entry site (IRES) (FIG. 1H); 8) a recombinant ΔICP4-modified HSV-1 genome comprising expression cassettes encoding a polycistronic mRNA under the control of a heterologous promoter integrated at each of the ICP4 loci, where the polycistronic mRNA contains the coding sequence of an antibody heavy and light chain separated by an internal ribosomal entry site (IRES) (FIG. 1I); 9) a recombinant ΔICP4/ΔICP22/ΔUL41-modified HSV-1 genome comprising expression cassettes containing the coding sequence of an antibody heavy chain under the control of a heterologous promoter integrated at each of the ICP4 loci, and an expression cassette containing the coding sequence of an antibody light chain under the control of a heterologous promoter integrated at the UL41 and ICP22 loci (FIG. 1J); 10) a recombinant ΔICP4/ΔICP22/ΔUL41-modified HSV-1 genome comprising expression cassettes containing the coding sequence of an antibody light chain under the control of a heterologous promoter integrated at each of the ICP4 loci, and an expression cassette containing the coding sequence of an antibody heavy chain under the control of a heterologous promoter integrated at the UL41 and ICP22 loci (FIG. 1K); 11) a recombinant ΔICP4/ΔUL41-modified HSV-1 genome comprising expression cassettes containing the coding sequence of an antibody heavy chain under the control of a heterologous promoter integrated at each of the ICP4 loci, and an expression cassette containing the coding sequence of a polycistronic mRNA under the control of a heterologous promoter integrated at the UL41 locus, where the polycistronic mRNA contains two copies of the coding sequence of an antibody light chain separated by an internal ribosomal entry site (IRES) (FIG. 1L); 12) a recombinant ΔICP4/ΔICP22-modified HSV-1 genome comprising expression cassettes containing the coding sequence of an antibody heavy chain under the control of a heterologous promoter integrated at each of the ICP4 loci, and an expression cassette containing the coding sequence of a polycistronic mRNA under the control of a heterologous promoter integrated at the ICP22 locus, where the polycistronic mRNA contains two copies of the coding sequence of an antibody light chain separated by an internal ribosomal entry site (IRES) (FIG. 1M); and 14) a recombinant ΔICP4/ΔICP22/ΔUL41-modified HSV-1 genome comprising expression cassettes containing the coding sequence of an antibody light chain under the control of a heterologous promoter integrated at the UL41 locus, and an expression cassette containing the coding sequence of an antibody heavy chain under the control of a heterologous promoter integrated at the ICP22 locus (FIG. 1N). The modified herpes simplex virus genome may be engineered as described above, except that the coding sequence for the full-length antibody heavy chain is replaced with the coding sequence of an antibody heavy chain variable region and constant region 1 (CH₁), such that the recombinant herpes simplex virus produces a Fab fragment.

[0265] These modified herpes simplex virus genome vectors are transfected into engineered Vero cells that are modified to express one or more herpes virus genes. These engineered Vero cells secrete in the supernatant of the cell culture a replication defective herpes simplex virus with the modified genomes packaged therein. The supernatant is then collected, concentrated, and sterile filtered through a 5 μm filter.

### Example 2: Construction and Validation of Recombinant Herpes Viruses Encoding Antibodies

[0266] First, a recombinant, attenuated HSV vector was designed to express a full-length antibody. A polynucleotide construct was generated which encoded, from 5′ to 3′, a first ORF encoding the antibody light chain (with a leader sequence), a synthetic IRES, and second ORF encoding the antibody heavy chain (with a leader sequence) (e.g., as depicted in FIGS. 1H and 1I). The IRES-based construct (encoded in an expression cassette which further contained a heterologous promoter and a polyA sequence) was then inserted into both copies of the HSV1 ICP4 gene locus. This first viral construct (HSV-flAb2) was engineered to express a chimeric anti-human CD20 IgG1 antibody containing a heavy chain variable region comprising the amino acid sequence of SEQ ID NO: 356 and a light chain variable region comprising the amino acid sequence of SEQ ID NO: 421.

[0267] Multiple plaques identified in a lawn of transgenic cells were picked and screened to identify vectors with correctly inserted IRES constructs. Briefly, Vero cells were infected with putative IRES viral isolates, infections were allowed to proceed for five days, and cell supernatants were harvested and tested for the presence of secreted full-length antibody by ELISA according to the manufacturer's instructions (Abcam, cat. no. ab195215). All of the tested isolates expressed and secreted their encoded antibody into the cell supernatants; however, the antibodies were produced at relatively low levels. The most productive isolate for HSV-flAb2 secreted 0.844 ng/mL of the encoded full-length chimeric antibody into the supernatant of infected Vero cells.

[0268] As an alternative to expressing full-length antibodies from the engineered vectors, which required the use of multiple ORFs encoding antibody light and heavy chains, recombinant HSV1 vectors were constructed to express single-chain antibodies from a single ORF (see e.g., FIGS. 1B and 1C). Here, single-chain antibodies were constructed to contain a leader sequence, a heavy chain variable region sequence, a light chain variable region sequence, a linker polypeptide linking the heavy and light chain variable regions, and an Fc region (i.e., an scFv-Fc antibody). Two different variants of each single-chain antibody were designed to contain both possible relative orientations of the light and heavy chain variable region sequences: the “Fc1” variant of each antibody contained, from n-terminus to c-terminus, a leader sequence-a heavy chain variable region-a linker sequence-a light chain variable region-and an Fc region; the “Fc2” variant of each antibody contained, from n-terminus to c-terminus, a leader sequence-a light chain variable region-a linker sequence-a heavy chain variable region-and an Fc region. These single-chain antibody constructs (encoded in an expression cassette which further contained a heterologous promoter and a polyA sequence) were then inserted into both copies of the HSV1 ICP4 gene locus. A summary of the sequences employed in each scFv-Fc antibody tested is provided in Table 4 below.

TABLE 4
HSV-encoded scFv-Fc antibodies

| | | | Heavy chain | Light chain | | |
|---|---|---|---|---|---|---|
| | | | variable | variable | | |
| Antibody | | | region | region | | |
| name: | Target: | Leader: | (VH): | (VL): | Linker: | Fc region: |
| Ab1Fc1 | Human | SEQ ID | SEQ ID | SEQ ID | SEQ ID | Human IgG1 Fc |
| | TNFα | NO: 510 | NO: 355 | NO: 420 | NO: 568 | (SEQ ID NO: 1120) |
| Ab1Fc2 | Human | SEQ ID | SEQ ID | SEQ ID | SEQ ID | Human IgG1 Fc |
| | TNFα | NO: 514 | NO: 355 | NO: 420 | NO: 568 | (SEQ ID NO: 1120) |
| Ab2Fc2 | Human | SEQ ID | SEQ ID | SEQ ID | SEQ ID | Human IgG1 Fc |
| | CD20 | NO: 514 | NO: 356 | NO: 421 | NO: 568 | (SEQ ID NO: 1120) |
| Ab5Fc1 | Human | SEQ ID | SEQ ID | SEQ ID | SEQ ID | Human IgG1 Fc |
| | IL-17 | NO: 488 | NO: 359 | NO: 424 | NO: 568 | (SEQ ID NO: 1120) |
| Ab5Fc2 | Human | SEQ ID | SEQ ID | SEQ ID | SEQ ID | Human IgG1 Fc |
| | IL-17 | NO: 536 | NO: 359 | NO: 424 | NO: 568 | (SEQ ID NO: 1120) |
| Ab37Fc1 | Human | SEQ ID | SEQ ID | SEQ ID | SEQ ID | Human IgG4 Fc |
| | IL-4Ra | NO: 510 | NO: 391 | NO: 456 | NO: 568 | (SEQ ID NO: 1121) |
| Ab37Fc2 | Human | SEQ ID | SEQ ID | SEQ ID | SEQ ID | Human IgG4 Fc |
| | IL-4Ra | NO: 536 | NO: 391 | NO: 456 | NO: 568 | (SEQ ID NO: 1121) |
| Ab66Fc1 | Mouse | SEQ ID | SEQ ID | SEQ ID | SEQ ID | Mouse IgG1 Fc |
| | IL-4Ra | NO: 510 | NO: 614 | NO: 866 | NO: 568 | (SEQ ID NO: 1122) |
| Ab66Fc2 | Mouse | SEQ ID | SEQ ID | SEQ ID | SEQ ID | Mouse IgG1 Fc |
| | IL-4Ra | NO: 1119 | NO: 614 | NO: 866 | NO: 568 | (SEQ ID NO: 1122) |
| Ab67Fc2 | Mouse | SEQ ID | SEQ ID | SEQ ID | SEQ ID | Human IgG1 Fc |
| | IL-17 | NO: 523 | NO: 615 | NO: 867 | NO: 568 | (SEQ ID NO: 1120) |
| Ab68Fc1 | Human | SEQ ID | SEQ ID | SEQ ID | SEQ ID | Human IgG1 Fc |
| | CCR4 | NO: 488 | NO: 616 | NO: 868 | NO: 568 | (SEQ ID NO: 1120) |
| Ab68Fc2 | Human | SEQ ID | SEQ ID | SEQ ID | SEQ ID | Human IgG1 Fc |
| | CCR4 | NO: 551 | NO: 616 | NO: 868 | NO: 568 | (SEQ ID NO: 1120) |

[0269] Virus plaques were identified and picked from lawns of engineered cells, and the isolates were individually screened in Vero cells to identify vectors that produced the encoded antibodies, as described above. Cell supernatants were harvested from the infected Vero cells and tested for the presence of secreted antibody by ELISA, according to the manufacturer's instructions (Abcam, cat. no. ab195215 for single-chain antibodies containing human Fc sequences; Abcam, cat. no. ab151276 for single-chain antibodies containing mouse Fc sequences). Table 5 below provides the average calculated concentration of each antibody secreted into the supernatant from infected cells.

TABLE 5
Concentration of single-chain antibodies
secreted from HSV-infected cells

| | | Concentration in Cell |
|---|---|---|
| Antibody name: | Target: | Supernatant (ng/mL): |
| Ab1Fc1 | Human TNFα | 5844.3724 |
| Ab1Fc2 | Human TNFα | 2880.65185 |
| Ab2Fc2 | Human CD20 | 16132.458 |
| Ab5Fc1 | Human IL-17 | >750 |
| Ab5Fc2 | Human IL-17 | >750 |
| Ab37Fc1 | Human IL-4Ra | 495.7056639 |
| Ab37Fc2 | Human IL-4Ra | >750 |
| Ab66Fc1 | Mouse IL-4Ra | 366.1442 |
| Ab66Fc2 | Mouse IL-4Ra | 357.26944 |
| Ab67Fc2 | Mouse IL-17 | >750 |
| Ab68Fc1 | Human CCR4 | >750 |
| Ab68Fc2 | Human CCR4 | >750 |

[0270] Surprisingly, all of the single-chain antibodies were secreted into the cell supernatant at a much higher concentration (at least >800-fold) than the full-length HSV-flAb2 antibody. As a direct comparison, the Fc2 single-chain variant of HSV-Ab2 was detected at a concentration 19,114-fold higher than the full-length variant of HSV-Ab2.

[0271] Next, a dose-ranging study was conducted to measure antibody secretion from human cells infected with engineered HSV1 vector encoding single-chain antibodies. Immortalized human keratinocytes (HaCaTs) were either mock infected (MOI 0) or infected with HSV vectors at various multiplicities of infection (MOIs) for 48 hours. The antibody-encoding vectors used in this experiment were: HSV-Ab1Fc1 (a single-chain human anti-human TNFα antibody), HSV-Ab1Fc2 (a single-chain human anti-human TNFα antibody), HSV-Ab2Fc2 (a single-chain chimeric anti-human CD20 antibody), HSV-Ab66Fc1 (a single-chain mouse anti-mouse IL-4Ra antibody), and HSV-Ab66Fc2 (a single-chain mouse anti-mouse IL-4Ra antibody). Upon completion of infection, supernatants were harvested from the infected cells and centrifuged at 11,000×g for 5 minutes. The antibodies secreted into the clarified supernatants were then quantified using an anti-human IgG (FIG. 2A) ELISA kit (Abcam, cat. no. ab195215) or an anti-mouse IgG (FIG. 2B) ELISA kit (Abcam, cat. no. ab151276). While little-to-know antibody was detected from mock infected cells, secreted human and chimeric antibodies were robustly detected in a dose-dependent manner from infected human keratinocytes (FIG. 2A). Single-chain mouse antibodies were also detected from secreted human keratinocytes, though their secretion did not appear to be dose-dependent (FIG. 2B).

[0272] Finally, to confirm that the HSV-encoded antibodies were functional, the ability of HSV-Ab1Fc1, a single-chain human anti-human TNFα antagonist antibody, to inhibit ELISA-based detection of TNFα was examined Immortalized human keratinocytes (HaCaTs) were left uninfected or were infected with HSV-Ab1Fc1 at an MOI of 0.3, 1, and 3 for 48 hours. After completion of infection, cell supernatants were harvested and cleared by centrifugation at 11,000×6 for 5 minutes. Recombinant human TNFα (1000 pg/mL) was added into the clarified cell supernatants and incubated for 2 hours at 37° C. An anti-TNFα ELISA was then performed (Abcam, cat. no. ab181421) to determine whether the single-chain Ab1Fc1 produced by the engineered virus could mediate suppression of TNFα detection. The detectable level of TNFα was significantly reduced in cell supernatants harvested from infected human cells, as compared to mock-infected cells (FIG. 3), confirming that the secreted single-chain antibody was indeed functional.

[0273] Taken together, the data presented in this example indicated that: (1) recombinant HSV-1 vectors were successfully constructed to encode full-length antibodies as well as antibody fragments; (2) the engineered vectors expressed/secreted hundreds to thousands-fold higher levels of single-chain antibodies compared to full-length antibodies; (3) vectors could reliably express fully human, chimeric, and mouse antibodies at comparable levels (containing Fc regions from multiple IgG isotypes); (4) HSV-mediated antibody secretion from human cells was dose-dependent; and (5) the secreted antibodies were functional. Without wishing to be bound by theory, it is believed that engineered herpes viral vectors present a novel method of administering multiple types of antibodies to humans.

### Example 3: Herpes Virus-Encoded Antibodies in a Mouse Atopic Dermatitis (AD) Model

[0274] Atopic dermatitis is a chronic, relapsing, and often intensely pruritic inflammatory disorder of the skin. The main cause of the disease appears to be a defect of the epidermal barrier resulting from a combination of a genetic predisposition, functioning of the immune system, and environmental factors. While the treatment for moderate-to-severe AD has been largely unchanged for decades, relying on broad-acting immunosuppressants, in recent years multiple therapies employing systemic administration of antibodies targeting various aspects of the complex immune activation of atopic dermatitis (such as antibodies targeting the IL-4 (e.g., dupilumab), IL-12/23p40 (e.g., ustekinumab), IL-13 (e.g., tralokinumab, lebrikizumab), IL-17 (e.g., secukinumab), and IL-31 (e.g., nemolizumab) pathways) have been explored in the clinical setting. In fact, a systemic therapy (bi-weekly subcutaneous injections) using the monoclonal antibody dupilumab (anti-IL-4Ra) was recently approved by the FDA for the treatment of atopic dermatitis. However, systemic administration of therapeutic antibodies targeting immune pathways have been shown to repress the immune system, exposing the patient to significant risk of infections and other complications.

[0275] The topical application of vitamin D3, or its synthetic analogs, induces AD-like inflammation in mouse skin. The skin inflammation model induced by the vitamin D analog calcipotriol (MC903) has recently gained increased attention, as topical application of MC903 induces high levels of TSLP and the infiltration of group 2 (IL-5+ and IL-13+) innate lymphoid cells to the skin, thereby resembling some immune perturbations observed in skin lesions of humans with AD. Topical MC903 administration has also been shown to induce increased IL-4 signaling in treated animals (Martel et al., Yale J Biol Med (2017)).

[0276] The goals of the in vivo experiments described here were: (1) to establish a mouse MC903-induced model of atopic dermatitis and demonstrate the feasibility of expressing an HSV-encoded antibody when the virus was topically administered to AD-like skin in these animals; and (2) to assess whether a mouse surrogate single-chain antibody of dupilumab (anti-IL-4Ra) would provide relief to one or more AD symptoms in this animal model.

[0277] Materials and Methods

[0278] For nucleic acid analysis, skin biopsies were lysed in Buffer RLT (AllPrep DNA/RNA Mini Kit, Qiagen, cat. no. 80204) with DTT (G-Biosciences, cat. no. 3483-12-3) using sonication with a QSONICA sonicator (125 W, 20 Hz) at an amplitude of 25%. Following sonication, high speed centrifugation was used to pellet any insoluble material. DNA and RNA were isolated using an AllPrep DNA/RNA Mini kit (Qiagen) according to the manufacturer's protocol. For qPCR/qRT-PCR analysis, 50 ng of DNA or RNA were used per reaction in a total reaction volume of 25 μL. DNA quantification was determined by qPCR analysis using a Taqman® Fast Advanced Master Mix (Applied Biosystems); RNA quantification was determined by qRT-PCR analysis using Quantabio 1-Step RT-qPCR ToughMix. All samples were run in duplicate or triplicate.

[0279] For immunofluorescence, 5 μm sections were taken from OCT frozen tissue, mounted on slides, and air dried for up to 1 hour. The slides were then dipped in 100% methanol (MeOH) for 10 minutes at −20° C. and left to air dry. The methanol-fixed sections were rehydrated by washing 3 times in PBS (5 minutes each) at room temperature, followed by an incubation at room temperature in 3% H₂O₂ for 10 minutes, and three subsequent washes in PBS. The samples were then incubated with a blocking solution (Power Block) for 1 hour at room temperature in a humidified chamber. Excess blocking solution was removed, and the sections were stained with a drop of primary antibody (Ab) solution prepared in antibody diluent buffer (30-50 μL primary Ab solution/section). The sections were incubated with the primary antibody (mouse anti-human IgG antibody; Abcam, cat. no. ab200699) for 16 hours at 4° C. or 1 hour at room temperature, washed three times in TBST (TBS+0.025% Triton X-100) for 5 minutes at room temperature, and secondary Ab (Alexa Fluor® 488-conjugated goat anti-mouse antibody; ThermoFisher, cat. no. A-11029) was applied at a 1:200 dilution in antibody diluent buffer for 30 minutes at room temperature in a humidified chamber. Slides were once again washed three times with TB ST, and the stained sections were mounted with mounting media (ProLong™ Gold Antifade Mountant with DAPI, ThermoFisher, cat. no. P36931) and covered with a coverslip. The sections were imaged after dehydration (approximately 24 hours) using an ECHO Fluorescence Microscope.

[0280] For hematoxylin and eosin (H&E) staining, 5 μm sections were taken from cryopreserved tissue, mounted on slides, and air dried for up to 1 hour. The dried slides were rehydrated by soaking in double-distilled water for 2 minutes at room temperature. Sections were then incubated in Hematoxylin Gill 2× (VWR) for 2 minutes at room temperature, followed by being dipped 2 to 3 times in acid alcohol, dipped 3 to 4 times in Blue in Ammonia water, and incubated in eosin (Eosin Y Solution 1%, VWR) for 2 minutes. Samples were rinsed 3 to 4 times with tap water between each step. The stained and rinsed sections were gradually dehydrated with ethanol (EtOH) by first rinsing twice with 95% EtOH for 2 minutes each, then twice with 100% EtOH for 2 minutes each. Sections were then cleared through three rinses with Histo-Clear for 2 minutes each, mounted with mounting media (Permount™ Mounting Medium, @P15-100), and covered with a coverslip. The sections were imaged approximately 24 hours after dehydration using a brightfield microscope.

[0281] Results

### Establishment of an AD Animal Model

[0282] An in vivo study was initiated to establish that MC903 induced atopic dermatitis-like symptoms in treated animals. For this study, 14 C57BL/6J mice were used (two mice per group). MC903 was prepared in ethanol (EtOH) at a concentration of 100 μM. Mice were anaesthetized with isoflurane, their backs were shaved and treated with a chemical hair removal agent, and 25 μL of EtOH or MC903/EtOH was applied to the left and right ears (both sides) and to 4 marked dorsal sites (˜2 cm² each) on Day 1. The mice were then retreated with EtOH or MC903/EtOH at the same sites on Days 2, 3, 4, and 5. Next, select cohorts of animals received topical treatment with HSV-Ab1Fc1 (or vehicle control) formulated in a gel carrier to the left and right ears and 2 dorsal sites of MC903 treatment, and received an intradermal injection of HSV-Ab1Fc1 (or vehicle control) to the remaining 2 dorsal sites of MC903 treatment, on Day 5 or Day 7. These mice were then euthanized on Days 7 and 9, respectively. The HSV-AbFc1 vector (fully human anti-TNFα single-chain antibody) was used in this experiment as a proof-of-concept to assess antibody expression in AD-like lesions since this virus was appropriately purified and characterized at the time of study initiation. Table 6 provides a summary of the experimental design.

TABLE 6
summary of study design establishing MC903 model

| Grp | Sensitizing Agent (SA) | SA Site | Test Article (TA) | TA Site | Termination |
|---|---|---|---|---|---|
| 1 | EtOH | 2 ears, 4 dorsal | N/A | N/A | Day 7 |
| | (Days 1-5) | | N/A | N/A | |
| 2 | MC903/EtOH | 2 ears, 4 dorsal | N/A | N/A | Day 5 |
| | (Days 1-5) | | N/A | N/A | |
| 3 | MC903/EtOH | 2 ears, 4 dorsal | N/A | N/A | Day 7 |
| | (Days 1-5) | | N/A | N/A | |
| 4 | MC903/EtOH | 2 ears, 4 dorsal | Vehicle-topical | 2 ears, | Day 7 |
| | (Days 1-5) | | (Day 5) | 2 dorsal | |
| | | | Vehicle-intradermal | 2 dorsal | |
| | | | (Day 5) | | |
| 5 | MC903/EtOH | 2 ears, 4 dorsal | HSV-Ab1Fc1-topical | 2 ears, | Day 7 |
| | (Days 1-5) | | (Day 5) | 2 dorsal | |
| | | | HSV-Ab1Fc1-intradermal | 2 dorsal | |
| | | | (Day 5) | | |
| 6 | MC903/EtOH | 2 ears, 4 dorsal | Vehicle-topical | 2 ears, | Day 9 |
| | (Days 1-5) | | (Day 7) | 2 dorsal | |
| | | | Vehicle-intradermal | 2 dorsal | |
| | | | (Day 7) | | |
| 7 | MC903/EtOH | 2 ears, 4 dorsal | HSV-Ab1Fc1-topical | 2 ears, | Day 9 |
| | (Days 1-5) | | (Day 7) | 2 dorsal | |
| | | | HSV-Ab1Fc1-intradermal | 2 dorsal | |
| | | | (Day 7) | | |

[0283] At the indicated termination day, animals were euthanized, and the dorsal treatment sites were harvested using an 8 mm punch biopsy, while the ears were removed in their entirety. One half of each biopsy/ear was quick-frozen in liquid nitrogen for nucleic acid analysis, while the other half was processed for immunofluorescence analysis (as described above).

[0284] To confirm the appearance of atopic dermatitis-like lesions in mouse skin after topical MC903 treatment (Days 1-5), qRT-PCR analysis was conducted on harvested tissues to quantify changes in expression of certain markers of atopic dermatitis which had been previously shown by others to be upregulated in MC903-exposed skin. Specifically, the average fold change in GAPDH-corrected mouse TSLP or IL-4 transcripts in MC903-treated ear or dorsal tissues were calculated relative to the corresponding EtOH treated ear or dorsal tissues using the delta-delta Ct method. As observed previously by other groups, repeated topical MC903 exposure induced significant TSLP (FIG. 4A) and IL-4 (FIG. 4B) expression in treated mouse skin, confirming establishment of an AD-like mouse model. Interestingly, the kinetics of TSLP and IL-4 expression differed, with TSLP levels peaking on Day 5 in both ear and dorsal skin, while IL-4 expression had more delayed kinetics, showing the highest levels of transcript expression at Day 7 in dorsal skin and Day 9 in ear skin.

[0285] Paralleling the increased expression of TSLP and IL-4, a concomitant thickening of the ear skin was observed at the sites of MC903 treatment vs. ethanol control treatment (FIG. 5), further confirming that MC903 induced atopic dermatitis-like symptoms in this mouse model.

[0286] Next, the feasibility of expressing an HSV-encoded antibody after topical administration to an atopic dermatitis-like lesion was examined using an engineered virus (HSV-Ab1Fc1) encoding an exemplary, fully human single-chain antibody (Ab1Fc1). Ear and dorsal skin tissue sections were prepared for immunofluorescent analysis from animals exposed to MC903 on Days 1-5 and treated topically with HSV-Ab1Fc1 (compounded in a methylcellulose gel carrier) or vehicle control (compounded in a methylcellulose gel carrier) on Day 5 or Day 7. FIG. 6A shows representative immunofluorescence images of ear and dorsal skin harvested on Day 7 after topical treatment with HSV-Ab1Fc1 or vehicle control on Day 5. FIG. 6B shows representative immunofluorescence images of ear and dorsal skin harvested on Day 9 after topical treatment with HSV-Ab1Fc1 or vehicle control on Day 7. Robust human IgG protein expression was detected in both the ear and dorsal tissues infected with HSV-Ab1Fc1 but not vehicle control, suggesting that the virus was capable of delivering its encoded antibody cargo into atopic dermatitis-like lesions after topical exposure.

[0287] Taken together this data demonstrated the successful establishment of an AD-like phenotype upon MC903 treatment, and the feasibility of robust local delivery of a virally encoded antibody into an AD-like lesion after topical HSV administrations.

Assessment of Antibody Efficacy after Topical Herpes Virus Delivery

[0288] Due to the confirmed atopic dermatitis-like nature of the lesions induced by MC903 therapy (see e.g., FIG. 4), the efficacy of a topical HSV-encoded antibody to reduce one or more signs or symptoms of atopic dermatitis was next tested in this animal model. As noted above, dupilumab (an anti-human IL-4Ra antibody) is the only FDA-approved antibody for treating atopic dermatitis at present, which is administered systemically by bi-weekly subcutaneous injections. Here, a recombinant herpes virus (HSV-Ab66Fc1) was engineered to express a dupilumab surrogate antibody that targeted mouse IL-4Ra (Ab66Fc1, a mouse anti-mouse IL-4Ra single-chain antibody), and was tested for its ability to reduce MC903-mediated ear thickening. In addition, use of an antibody targeting the IL-4 pathway was chosen, in part, due to the observation that MC903 induced significant IL-4 signaling in C57BL/6J mice (FIG. 4B).

[0289] For this study, 8 C57BL/6J mice were used (two mice per group). MC903 was prepared in ethanol (EtOH) at a concentration of 100 μM. The backs of the mice were shaved with electric clippers and treated with a chemical hair removal compound on Day −2. On Day 1, mice were anaesthetized with isoflurane and 25 μL of EtOH or MC903/EtOH was applied to the left and right ears (both sides) and to 4 marked dorsal sites (˜2 cm² each). The mice were retreated with EtOH or MC903/EtOH at the same sites on Days 2, 3, 4, and 5 of the study. Next, select cohorts of animals received a total of five topical treatments with HSV-Ab66Fc1 or vehicle control formulated in a gel carrier to the left and right ears and 2 dorsal sites of EtOH or MC903/EtOH treatment, and received five total intradermal injections of HSV-Ab66Fc1 or vehicle control to the remaining 2 dorsal sites of EtOH or EtOH/MC903 treatment, per the study schedule. Table 6 provides a summary of the experimental design.

TABLE 6
summary of study design assessing HSV-encoded antibody efficacy

| | Sensitizing | Sensitization | | Test Article Treatment | | Termination |
|---|---|---|---|---|---|---|
| Grp | Agent | (Day) | Test Article | (Day) | #of sites | (Day) |
| 1 | EtOH | 1, 2, 3, 4, 5 | Vehicle | ears | 2 | 10 |
| | | | | 1, 3, 5, 7, 9 | (TOP) | |
| | | | | backs | 4 | |
| | | | | 1, 3, 5, 7, 9 | (2 TOP, 2 ID) | |
| 2 | MC903/EtOH | 1, 2, 3, 4, 5 | Vehicle | ears | 2 | 10 |
| | | | | 1, 3, 5, 7, 9 | (TOP) | |
| | | | | backs | 4 | |
| | | | | 1, 3, 5, 7, 9 | (2 TOP, 2 ID) | |
| 3 | EtOH | 1, 2, 3, 4, 5 | Ab66 | ears | 2 | 10 |
| | | | | 1, 3, 5, 7, 9 | (TOP) | |
| | | | | backs | 4 | |
| | | | | 1, 3, 5, 7, 9 | (2 TOP, 2 ID) | |
| 4 | MC903/EtOH | 1, 2, 3, 4, 5 | Ab66 | ears | 2 | 10 |
| | | | | 1, 3, 5, 7, 9 | (TOP) | |
| | | | | backs | 4 | |
| | | | | 1, 3, 5, 7, 9 | (2 TOP, 2 ID) | |

TOP = topical treatment;
ID = intradermal injection

[0290] On Day 10, 8 mm punch biopsies were harvested from dorsal skin, while the ears were removed in their entirety, and the tissues were processed for nucleic acid analysis. qPCR data from the tissue harvests indicated that the engineered HSV genomes encoding the Ab66Fc1 transgene efficiently transduced MC903-treated ear skin (FIG. 7A), and, to a lesser extent, the MC903-treated dorsal skin (FIG. 7B) of immunocompetent animals Significant viral transduction was also observed in ethanol-treated ear skin, likely due to the thinness and fragility of this tissue type. Not only did the viral genomes efficiently transduce the ear skin, but the mouse anti-IL-4Ra single chain antibody was robustly expressed after infection, as assessed by qRT-PCR analysis (FIG. 7C) Minimal Ab66Fc1 transcripts were detected in the MC903-treated dorsal skin, paralleling the significantly lower transduction efficiency observed in this tissue, potentially due to the lesser MC903-induced skin compromise in this tissue type. No Ab66Fc1 DNA or RNA was detected in the vehicle control-treated tissues, indicating specificity of the assay for the single-chain antibody. Unfortunately, due to the single-chain antibody comprising a mouse IgG Fc, specific immunofluorescent detection of expressed protein was not possible in these samples due to endogenous mouse IgG.

[0291] To assess efficacy of the topical therapy, ear thickness was measured for both ears on each mouse daily from Days 1-10 using a digital caliper (FIG. 8A). As expected, MC903 exposure induced significant ear thickening in treated mice, as compared to ethanol exposure. The average ear thickness at Day 10 for ethanol/vehicle treated animals was 0.19 mm, while the average thickness at this same time point for MC903/vehicle treated animals was 0.6125 mm. However, a significant reduction in ear thickening (>22% thinning) was observed by Day 5 in the MC903/Ab66Fc1 treated ears as compared to the MC903/vehicle treated ears, which carried through to the end of the experiment. The antibody caused no appreciable change in ear thickness of ethanol exposed ears (compare EtOH/veh to EtOH/Ab66 in FIG. 8A), confirming specificity of the antibody for reducing this atopic dermatitis-like phenotype.

[0292] Interestingly, the improvement in MC903-induced ear thickening at Day 5 mediated by topical treatment with HSV-Ab66Fc1 was comparable to the improvement observed at Day 5 in a parallel MC903 mouse model after administration of an anti-IL17c antibody (a pathway targeted by AD antibodies currently in human clinical trials (e.g., secukinumab)) published previously (see FIG. 5 of WO2017060289). However, while the positive results on ear thickness observed in the present study and those described in WO2017060289 were similar, the differences in the therapeutic approaches were stark. The study described in WO2017060289 required systemic administration of the therapeutic antibody via high dose intraperitoneal injection, and included an antibody pre-treatment step where the first dose of antibody was administered three days before MC903 treatment was initiated. The present example used local (as opposed to systemic) administration of the drug product, and did not employ any antibody pre-treatment (the first HSV-Ab66Fc1 application occurred after the first MC903 application).

[0293] At Day 10, the harvested ears from each mouse were weighed prior to any tissue manipulation. Paralleling the results from the ear thickness measures, MC903 treatment significantly increased average ear weight compared to ethanol control, which was partially rescued by HSV-Ab66Fc1 therapy (FIG. 8B). At the Day 10 harvest, it was also noted that the MC903/vehicle treated ears felt much stiffer/less malleable than the MC903/Ab66 treated ears, providing a qualitative measure of treatment efficacy.

[0294] Taken together, this data indicated that engineered recombinant herpes viruses could successfully express their encoded cargo in atopic dermatitis-like lesions after topical treatment, and further, expression of an antagonist antibody targeting a pathway known to play a role in human AD disease provided quantitative and qualitative improvements in the disease phenotype. Without wishing to be bound by theory, it is believed that localized administration of a herpes viral vector encoding an antibody provides a novel and unique method of delivering an effective immunotherapy (e. g., to treat inflammatory diseases/conditions like atopic dermatitis) while limiting systemic exposure to the antibody.

What is claimed is:

1. A recombinant herpes virus genome comprising one or more polynucleotides encoding an antibody.

2. The recombinant herpes virus genome of claim 1, wherein the antibody is an antibody fragment.

3. The recombinant herpes virus genome of claim 2, wherein the antibody fragment is a Fab, Fab′ Fab′-SH, F(ab′)2, Fv, scFv, or scFv-Fc fragment.

4. The recombinant herpes virus genome of claim 1, wherein the antibody is a single-domain antibody.

5. The recombinant herpes virus genome of claim 1, wherein the antibody is a full-length antibody.

6. The recombinant herpes virus genome of any one of claims 1-5, wherein the antibody is a murine antibody, a chimeric antibody, a humanized antibody, a human antibody, a monoclonal antibody, or a multispecific antibody.

7. The recombinant herpes virus genome of any one of claims 1-6, wherein the antibody is an IgA, IgD, IgE, IgG, or IgM antibody.

8. The recombinant herpes virus genome of any one of claims 1-7, wherein the antibody is an IgG antibody.

9. The recombinant herpes virus genome of claim 8, wherein the IgG antibody is an IgG1, IgG2, IgG3, or IgG4 antibody.

10. The recombinant herpes virus genome of claim 8 or claim 9, wherein the IgG antibody is an IgG1 antibody.

11. The recombinant herpes virus genome of claim 8 or claim 9, wherein the IgG antibody is an IgG4 antibody.

12. The recombinant herpes virus genome of any one of claims 1-11, wherein the antibody is an agonist antibody.

13. The recombinant herpes virus genome of any one of claims 1-11, wherein the antibody is an antagonist antibody.

14. The recombinant herpes virus genome of any one of claims 1-13, wherein the antibody comprises a heavy chain variable region comprising an HVR-H1, an HVR-H2, and an HVR-H3, wherein the HVR-H1 comprises a sequence selected from the group consisting of SEQ ID NOS: 1-59, the HVR-H2 comprises a sequence selected from the group consisting of SEQ ID NOS: 60-122, and/or the HVR-H3 comprises a sequence selected from the group consisting of SEQ ID NOS: 123-185.

15. The recombinant herpes virus genome of any one of claims 1-14, wherein the antibody comprises a light chain variable region comprising an HVR-L1, an HVR-L2, and an HVR-L3, wherein the HVR-L1 comprises a sequence selected from the group consisting of SEQ ID NOS: 186-242, the HVR-L2 comprises a sequence selected from the group consisting of SEQ ID NOS: 243-294, and/or the HVR-L3 comprises a sequence selected from the group consisting of SEQ ID NOS: 295-354.

16. The recombinant herpes virus genome of any one of claims 1-13, wherein the antibody comprises a heavy chain variable region comprising a sequence having at least 85%, at least 90%, at least 91%, at least 92%, at least 93%, at least 94%, at least 95%, at least 96%, at least 97%, at least 98%, at least 99%, or 100% sequence identity to an amino acid sequence selected from the group consisting of SEQ ID NOS: 355-419 or 614-865.

17. The recombinant herpes virus genome of any one of claims 1-13, wherein the antibody comprises a light chain variable region comprising a sequence having at least 85%, at least 90%, at least 91%, at least 92%, at least 93%, at least 94%, at least 95%, at least 96%, at least 97%, at least 98%, at least 99%, or 100% sequence identity to an amino acid sequence selected from the group consisting of SEQ ID NOS: 420-482 or 866-1116.

18. The recombinant herpes virus genome of any one of claims 1-13, wherein the antibody comprises: (a) a heavy chain variable region comprising a sequence having at least 85%, at least 90%, at least 91%, at least 92%, at least 93%, at least 94%, at least 95%, at least 96%, at least 97%, at least 98%, at least 99%, or 100% sequence identity to an amino acid sequence selected from the group consisting of SEQ ID NOS: 355-419 or 614-865; and (b) a light chain variable region comprising a sequence having at least 85%, at least 90%, at least 91%, at least 92%, at least 93%, at least 94%, at least 95%, at least 96%, at least 97%, at least 98%, at least 99%, or 100% sequence identity to an amino acid sequence selected from the group consisting of SEQ ID NOS: 420-482 or 866-1116.

19. The recombinant herpes virus genome of any one of claims 1-13, wherein the antibody is selected from the group consisting of abagovomab, abciximab, abituzumab, abrezekimab, abrilumab, actoxumab, adalimumab, adecatumumab, aducanumab, afasevikumab, afelimomab, afutuzumab, alacizumab, alemtuzumab, alirocumab, altumomab, amatuximab, anatumomab, andecaliximab, anetumab, anifrolumab, anrukinzumab, apolizumab, aprutumab, arcitumomab, ascrinvacumab, aselizumab, atezolizumab, atinumab, atlizumab, atorolimumab, avelumab, azintuxizumab, bapineuzumab, basiliximab, bavituximab, bectumomab, begelomab, belantamab, belimumab, bemarituzumab, belimumab, bemaritzumab, benralizumab, berlimatoxumab, bersanlimab, bertilimumab, besilesomab, bevacizumab, bezlotoxumab, biciromab, bimagrumab, bimekizumab, birtamimab, bivatuzumab, bleselumab, blinatumomab, blontuvetmab, blosozumab, bococizumab, brazikumab, brentuximab, briakinumab, brodalumab, brolucizumab, brontictuzumab, burosumab, cabiralizumab, camidanlumab, camrelizumab, canakinumab, cantuzumab, caplacizumab, capromab, carlumab, carotuximab, catumaxomab, cedelizumab, cemiplimab, cergutuzumab, certolizumab, cetrelimab, cetuximab, cibisatamab, citatuzumab, cixutumumab, clazakizumab, clenoliximab, clivatuzumab, codrituzumab, cofetuzumab, coltuximab, conatumumab, concizumab, cosfroviximab, crenezumab, crizanlizumab, crotedumab, cusatuzumab, dacetuzumab, daclizumab, dalotuzumab, dapirolizumab, daratumumab, dectrekumab, demcizumab, denintuzumab, denosumab, depatuxizumab, derlotuximab, detumomab, dezamizumab, dinutuximab, diridavumab, domagrozumab, dorlimomab, drozitumab, duligotuzumab, dupilumab, durvalumab, dusigitumab, duvortuxizumab, ecromeximab, eculizumab, edobacomab, edrecolomab, efalizumab, efungumab, eldelumab, elezanumab, elgemtumab, elotuzumab, elsilimomab, emactuzumab, emapalumab, emibetuzumab, emicizumab, enapotamab, enavatuzumab, enfortumab, enlimomab, enoblituzumab, enokizumab, enoticumab, ensituximab, epitumomab, epratuzumab, eptinezumab, erenumab, erlizumab, ertumaxomab, etaracizumab, etigilimab, etrolizumab, evinacumab, evolocumab, exbivirumab, fanolesomab, faralimomab, faricimab, farletuzumab, fasinumab, felvizumab fezakinumab, fibatuzumab, ficlatuzumab, figitumumab, firivumab, flanvotumab, fletikumab, flotetuzumab, fontolizumab, foralumab, foravirumab, fremanezumab, fresolimumab, frunevetmab, fulranumab, futuximab, galcanezumab, galiximab, gancotamab, ganitumab, gantenerumab, gatipotuzumab, gavilimomab, gedivumab, gemtuzumab, gevokizumab, gilvetmab, gimsilumab, girentuximab, glembatumumab, golimumab, gomiliximab, gosuranemab, guselkumab, ianalumab, ibalizumab, ibritumomab, icrucumab, idarucizumab, ifabotuzumab, igovomab, iladatuzumab, imalumab, imaprelimab, imciromab, imgatuzumab, inclacumab, indatuximab, indusatumab, inebilizumab, inflectra, infliximab, intetumumab, inolimomab, inotuzumab, ipilimumab, iratumumab, isatuximab, iscalimab, istiratumab, itolizumab, ixekizumab, keliximab, labetuzumab, lacnotuzumab, ladiratuzumab, lampalizumab, lanadelumab, landogrozumab, laprituximab, larcaviximab, lebrikizumab, lemalesomab, lendalizumab, lenvervimab, lenzilumab, lerdelimumab, leronlimab, lesofavumab, letolizumab, lexatumumab, libivirumab, lifastuzumab, ligelizumab, loncastuximab, losatuxizumab, lilotomab, lintuzumab, lirilumab, lodelcizumab, lokivetmab, lorvotuzumab, lucatumumab, lulizumab, lumiliximab, lumretuzumab, lupartumab, lutikizumab, mapatumumab, margetuximab, marstacimab, maslimomab, mavrilimumab, matuzumab, mepolizumab, metelimumab, milatuzumab, minretumomab, mirikizumab, mirvetuximab, mitumomab, modotuximab, mogamulizumab, monalizumab, morolimumab, mosunetuzumab, motavizumab, moxetumomab, nacolomab, namilumab, naptumomab, naratuximab, narnatumab, natalizumab, navicixizumab, navivumab, naxitamab, nebacumab, necitumumab, nemolizumab, nerelimomab, nesvacumab, netakimab, nimotuzumab, nirsevimab, nivolumab, nofetumomab, obiltoxaximab, obinutuzumab, ocaratuzumab, ocrelizumab, odulimomab, ofatumumab, olaratumab, oleclumab, olendalizumab, olokizumab, omalizumab, onartuzumab, ontuxizumab, onvatilimab, opicinumab, oportuzumab, oregovomab, orticumab, otelixizumab, otilimab, otlertuzumab, oxelumab, ozanezumab, ozoralizumab, pagibaximab, palivizumab, pamrevlumab, panitumumab, pankomab, panobacumab, parsatuzumab, pascolizumab, pasotuxizumab, pateclizumab, patritumab, pembrolizumab, pemtumomab, perakizumab, pertuzumab, pexelizumab, pidilizumab, pinatuzumab, pintumomab, placulumab, plozalizumab, pogalizumab, polatuzumab, ponezumab, porgaviximab, prasinezumab, prezalizumab, priliximab, pritoxaximab, pritumumab, quilizumab, racotumomab, radretumab, rafivirumab, ralpancizumab, ramucirumab, ranevetmab, ranibizumab, raxibacumab, ravagalimab, ravulizumab, refanezumab, regavirumab, remtolumab, reslizumab, rilotumumab, rinucumab, risankizumab, rituximab, rivabazumab, robatumumab, roledumab, romilkimab, romosozumab, rontalizumab, rosmantuzumab, rovalpituzumab, rovelizumab, rozanolixizumab, ruplizumab, sacituzumab, samalizumab, samrotamab, sapelizumab, sarilumab, satralizumab, satumomab, secukinumab, selicrelumab, seribantumab, setoxaximab, setrusumab, sevirumab, sibrotuzumab, sifalimumab, siltuximab, simtuzumab, siplizumab, sirtratumab, sirukumab, sofituzumab, solanezumab, solitomab, sonepcizumab, sontuzumab, spartalizumab, stamulumab, sulesomab, suptavumab, sutimlimab, suvizumab, suvratoxumab, tabalumab, tacatuzumab, tadocizumab, talacotuzumab, talizumab, tamtuvetmab, tanezumab, taplitumomab, tarextumab, tavolimab, tefibazumab, telimomab, telisotuzumab, tenatumomab, teneliximab, teplizumab, tepoditamab, teprotumumab, tesidolumab, tetulomab, tezepelumab, tibulizumab, tildrakizumab, tigatuzumab, timigutuzumab, timolumab, tiragotumab, tislelizumab, tisotumab, tocilizumab, tomuzotuximab, toralizumab, tosatoxumab, tositumomab, tovetumab, tralokinumab, trastuzumab, tregalizumab, tremelimumab, trevogrumab, tucotuzumab, tuvirumab, ublituximab, ulocuplumab, urelumab, urtoxazumab, ustekinumab, utomilumab, vadastuximab, vanalimab, vandortuzumab, vantictumab, vanucizumab, vapaliximab, varisacumab, varlilumab, vatelizumab, vedolizumab, veltuzumab, vepalimomab, vesencumab, visilizumab, vobarilizumab, volociximab, vonlerolizumab, vopratelimab, vorsetuzumab, votumumab, vunakizumab, xentuzumab, zalutumumab, zanolimumab, zatuximab, zenocutuzumab, ziralimumab, zolbetuximab, and zolimomab.

20. The recombinant herpes virus genome of any one of claims 1-19, wherein the recombinant herpes virus genome is replication competent.

21. The recombinant herpes virus genome of any one of claims 1-19, wherein the recombinant herpes virus genome is replication defective.

22. The recombinant herpes virus genome of any one of claims 1-21, wherein the recombinant herpes virus genome is selected from the group consisting of a recombinant herpes simplex virus genome, a recombinant varicella zoster virus genome, a recombinant human cytomegalovirus genome, a recombinant herpesvirus 6A genome, a recombinant herpesvirus 6B genome, a recombinant herpesvirus 7 genome, a recombinant Kaposi's sarcoma-associated herpesvirus genome, and any derivatives thereof.

23. The recombinant herpes virus genome of any one of claims 1-22, wherein the recombinant herpes virus genome is a recombinant herpes simplex virus genome.

24. The recombinant herpes virus genome of claim 23, wherein the recombinant herpes simplex virus genome is a recombinant type 1 herpes simplex virus (HSV-1) genome, a recombinant type 2 herpes simplex virus (HSV-2) genome, or any derivatives thereof.

25. The recombinant herpes virus genome of claim 23 or claim 24, wherein the recombinant herpes simplex virus genome is a recombinant type 1 herpes simplex virus (HSV-1) genome.

26. The recombinant herpes virus genome of any one of claims 22-25, wherein the recombinant herpes simplex virus genome comprises an inactivating mutation.

27. The recombinant herpes virus genome of claim 26, wherein the inactivating mutation is in a herpes simplex virus gene.

28. The recombinant herpes virus genome of claim 27, wherein the inactivating mutation is a deletion of the coding sequence of the herpes simplex virus gene.

29. The recombinant herpes virus genome of claim 27 or claim 28, wherein the herpes simplex virus gene is selected from the group consisting of Infected Cell Protein (ICP) 0, ICP4, ICP22, ICP27, ICP47, thymidine kinase (tk), Long Unique Region (UL) 41, and UL55.

30. The recombinant herpes virus genome of claim 29, wherein the recombinant herpes simplex virus genome comprises an inactivating mutation in one or both copies of the ICP4 gene.

31. The recombinant herpes virus genome of claim 29 or claim 30, wherein the recombinant herpes simplex virus genome comprises an inactivating mutation in the ICP22 gene.

32. The recombinant herpes virus genome of any one of claims 29-31, wherein the recombinant herpes simplex virus genome comprises an inactivating mutation in the UL41 gene.

33. The recombinant herpes virus genome of any one of claims 29-32, wherein the recombinant herpes simplex virus genome comprises an inactivating mutation in one or both copies of the ICP0 gene.

34. The recombinant herpes virus genome of any one of claims 29-33, wherein the recombinant herpes simplex virus genome comprises an inactivating mutation in the ICP27 gene.

35. The recombinant herpes virus genome of any one of claims 22-34, wherein the recombinant herpes simplex virus genome comprises the one or more polynucleotides encoding the antibody within one or both of the ICP4 viral gene loci.

36. The recombinant herpes virus genome of any one of claims 1-35, wherein the recombinant herpes virus genome has reduced cytotoxicity when introduced into a target cell, as compared to a corresponding wild-type herpes virus genome.

37. The recombinant herpes virus genome of claim 36, wherein the target cell is a human cell.

38. A herpes virus comprising the recombinant herpes virus genome of any one of claims 1-37.

39. The herpes virus of claim 38, wherein the herpes virus is replication competent.

40. The herpes virus of claim 38, wherein the herpes virus is replication defective.

41. The herpes virus of any one of claims 38-40, wherein the herpes virus has reduced cytotoxicity as compared to a corresponding wild-type herpes virus.

42. The herpes virus of any one of claims 38-41, wherein the herpes virus is selected from the group consisting of a herpes simplex virus, a varicella zoster virus, a human cytomegalovirus, a herpesvirus 6A, a herpesvirus 6B, a herpesvirus 7, and a Kaposi's sarcoma-associated herpesvirus.

43. The herpes virus of any one of claims 38-42, wherein the herpes virus is a herpes simplex virus.

44. The herpes virus of claim 43, wherein the herpes simplex virus is a type 1 herpes simplex virus (HSV-1), a type 2 herpes simplex virus (HSV-2), or any derivatives thereof.

45. The herpes virus of claim 43 or claim 44, wherein the herpes simplex virus is a type 1 herpes simplex virus (HSV-1).

46. A pharmaceutical composition comprising the recombinant herpes virus genome of any one of claims 1-37 or the herpes virus of any one of claims 38-45 and a pharmaceutically acceptable excipient.

47. The pharmaceutical composition of claim 46, wherein the pharmaceutical composition is suitable for topical, transdermal, subcutaneous, intradermal, transmucosal, oral, intranasal, intratracheal, sublingual, nasal, buccal, rectal, vaginal, intravenous, intraarterial, intramuscular, intracardiac, intraosseous, intraperitoneal, intraorbital, intravitreal, subconjunctival, suprachoroidal, subretinal, intraarticular, peri-articular, local, epicutaneous, and/or inhaled administration.

48. The pharmaceutical composition of claim 46 or claim 47, wherein the pharmaceutical composition is suitable for topical administration.

49. The herpes virus of any one of claims 38-45 or the pharmaceutical composition of any one of claims 46-48 for use as a medicament.

50. The herpes virus of any one of claims 38-45 or the pharmaceutical composition of any one of claims 46-48 for use in a therapy.

51. Use of the herpes virus of any one of claims 38-45 or the pharmaceutical composition of any one of claims 46-48 in the manufacture of a medicament for treating a disease.

52. The use of claim 51, wherein the disease is selected from the group consisting of psoriasis, atopic dermatitis, pyoderma gangrenosum, a blistering disease, pemphigus, pemphigus vulgaris, pemphigus foliaceus, an autoimmune bullous skin disorder, bullous pemphigoid, Behçet's disease, cancer, hidradenitis suppurativa, arthritis, rheumatoid arthritis, psoriatic arthritis, osteoarthritis, juvenile idiopathic arthritis, ankylosing spondylitis, axial spondylarthritis, reactive arthritis, enteropathic arthritis, an autoimmune disease, asthma, thyroid eye disease, an infectious disease, and a neurological disease.

53. A method of administering an antibody to a subject, the method comprising administering to the subject an effective amount of the herpes virus of any one of claims 38-45 or the pharmaceutical composition of any one of claims 46-48.

54. A method of providing prophylactic, palliative, and/or therapeutic relief of one or more signs or symptoms of a disease in a subject, the method comprising administering to the subject an effective amount of the herpes virus of any one of claims 38-45 or the pharmaceutical composition of any one of claims 46-48.

55. The method of claim 53 or claim 54, wherein the herpes virus or pharmaceutical composition is administered topically, transdermally, subcutaneously, intradermally, transmucosally, orally, intranasally, intratracheally, sublingually, nasally, buccally, rectally, vaginally, intravenously, intraarterially, intramuscularly, intracardially, intraosseously, intraperitoneally, intraorbitally, intravitreally, subconjunctivally, suprachoroidally, subretinally, intraarticularly, peri-articularly, locally, epicutaneously, or via inhalation.

56. The method of claim 54 or claim 55, wherein the disease is selected from the group consisting of psoriasis, atopic dermatitis, pyoderma gangrenosum, a blistering disease, pemphigus, pemphigus vulgaris, pemphigus foliaceus, an autoimmune bullous skin disorder, bullous pemphigoid, Behçet's disease, cancer, hidradenitis suppurativa, arthritis, rheumatoid arthritis, psoriatic arthritis, osteoarthritis, juvenile idiopathic arthritis, ankylosing spondylitis, axial spondylarthritis, reactive arthritis, enteropathic arthritis, asthma, an autoimmune disease, thyroid eye disease, an infectious disease, and a neurological disease.

57. A method of administering an antibody to the epidermis and/or dermis of a subject, the method comprising topically, transdermally, or intradermally administering to the subject an effective amount of the herpes virus of any one of claims 38-45 or the pharmaceutical composition of any one of claims 46-48.

58. The method of claim 57, wherein the skin of the subject is abraded prior to administration.

59. A method of administering an antibody to the mucosa of a subject, the method comprising topically, transmucosally, orally, sublingually, nasally, intranasally, via inhalation, or buccally administering to the subject an effective amount of the herpes virus of any one of claims 38-45 or the pharmaceutical composition of any one of claims 46-48.

60. A method of administering an antibody to the airway or lungs of a subject, the method comprising orally, sublingually, nasally, intranasally, intratracheally, via inhalation, or buccally administering to the subject an effective amount of the herpes virus of any one of claims 38-45 or the pharmaceutical composition of any one of claims 46-48.

61. A method of administering an antibody to one or more joints of a subject, the method comprising intraarticularly administering to the subject an effective amount of the herpes virus of any one of claims 38-45 or the pharmaceutical composition of any one of claims 46-48.

62. A method of administering an antibody to one or both eyes of a subject, the method comprising topically, intraorbitally, intravitreally, subconjunctivally, subretinally, or suprachoroidally administering to the subject an effective amount of the herpes virus of any one of claims 38-45 or the pharmaceutical composition of any one of claims 46-48.

63. The method of any one of claims 53-62, wherein the subject is a human.

64. The method of any one of claims 53-63, wherein the subject is not exposed to the antibody systemically.

The application's sequence listing, which the Patent Office published only in electronic form, follows.

SEQUENCE LISTING (1122 sequences)

SEQ ID NO: 1 - protein, 5 aa, Artificial Sequence
  Synthetic Construct
DYAMH

SEQ ID NO: 2 - protein, 5 aa, Artificial Sequence
  Synthetic Construct
SYNMH

SEQ ID NO: 3 - protein, 5 aa, Artificial Sequence
  Synthetic Construct
NYGMN

SEQ ID NO: 4 - protein, 5 aa, Artificial Sequence
  Synthetic Construct
TYWLG

SEQ ID NO: 5 - protein, 5 aa, Artificial Sequence
  Synthetic Construct
NYWMN

SEQ ID NO: 6 - protein, 5 aa, Artificial Sequence
  Synthetic Construct
DYHIH

SEQ ID NO: 7 - protein, 5 aa, Artificial Sequence
  Synthetic Construct
RYGIS

SEQ ID NO: 8 - protein, 5 aa, Artificial Sequence
  Synthetic Construct
NYWIG

SEQ ID NO: 9 - protein, 5 aa, Artificial Sequence
  Synthetic Construct
DQTIH

SEQ ID NO: 10 - protein, 5 aa, Artificial Sequence
  Synthetic Construct
TYWMT

SEQ ID NO: 11 - protein, 5 aa, Artificial Sequence
  Synthetic Construct
NHWMN

SEQ ID NO: 12 - protein, 5 aa, Artificial Sequence
  Synthetic Construct
NHWMN

SEQ ID NO: 13 - protein, 5 aa, Artificial Sequence
  Synthetic Construct
NHWMN

SEQ ID NO: 14 - protein, 5 aa, Artificial Sequence
  Synthetic Construct
ELSIH

SEQ ID NO: 15 - protein, 6 aa, Artificial Sequence
  Synthetic Construct
SDHAWS

SEQ ID NO: 16 - protein, 5 aa, Artificial Sequence
  Synthetic Construct
SYAMH

SEQ ID NO: 17 - protein, 5 aa, Artificial Sequence
  Synthetic Construct
DYGMN

SEQ ID NO: 18 - protein, 5 aa, Artificial Sequence
  Synthetic Construct
SFGMH

SEQ ID NO: 19 - protein, 5 aa, Artificial Sequence
  Synthetic Construct
SYTMH

SEQ ID NO: 20 - protein, 5 aa, Artificial Sequence
  Synthetic Construct
DYVIH

SEQ ID NO: 21 - protein, 5 aa, Artificial Sequence
  Synthetic Construct
DSWIH

SEQ ID NO: 22 - protein, 5 aa, Artificial Sequence
  Synthetic Construct
RYWMS

SEQ ID NO: 23 - protein, 5 aa, Artificial Sequence
  Synthetic Construct
NSGMH

SEQ ID NO: 24 - protein, 5 aa, Artificial Sequence
  Synthetic Construct
NYYMY

SEQ ID NO: 25 - protein, 5 aa, Artificial Sequence
  Synthetic Construct
VYGMN

SEQ ID NO: 26 - protein, 5 aa, Artificial Sequence
  Synthetic Construct
DFYMN

SEQ ID NO: 27 - protein, 5 aa, Artificial Sequence
  Synthetic Construct
AYEMK

SEQ ID NO: 28 - protein, 5 aa, Artificial Sequence
  Synthetic Construct
DTYIH

SEQ ID NO: 29 - protein, 5 aa, Artificial Sequence
  Synthetic Construct
NYWIQ

SEQ ID NO: 30 - protein, 6 aa, Artificial Sequence
  Synthetic Construct
HDHAWS

SEQ ID NO: 31 - protein, 5 aa, Artificial Sequence
  Synthetic Construct
NYWIA

SEQ ID NO: 32 - protein, 5 aa, Artificial Sequence
  Synthetic Construct
NNAIN

SEQ ID NO: 33 - protein, 5 aa, Artificial Sequence
  Synthetic Construct
RYWMH

SEQ ID NO: 34 - protein, 5 aa, Artificial Sequence
  Synthetic Construct
SYRMH

SEQ ID NO: 35 - protein, 5 aa, Artificial Sequence
  Synthetic Construct
DYAMT

SEQ ID NO: 36 - protein, 5 aa, Artificial Sequence
  Synthetic Construct
NYAMN

SEQ ID NO: 37 - protein, 5 aa, Artificial Sequence
  Synthetic Construct
DYWMQ

SEQ ID NO: 38 - protein, 5 aa, Artificial Sequence
  Synthetic Construct
NFGMT

SEQ ID NO: 39 - protein, 5 aa, Artificial Sequence
  Synthetic Construct
SYDMS

SEQ ID NO: 40 - protein, 5 aa, Artificial Sequence
  Synthetic Construct
SNVIS

SEQ ID NO: 41 - protein, 5 aa, Artificial Sequence
  Synthetic Construct
DSSIN

SEQ ID NO: 42 - protein, 5 aa, Artificial Sequence
  Synthetic Construct
SYWIH

SEQ ID NO: 43 - protein, 5 aa, Artificial Sequence
  Synthetic Construct
SYGMH

SEQ ID NO: 44 - protein, 5 aa, Artificial Sequence
  Synthetic Construct
DYGMT

SEQ ID NO: 45 - protein, 5 aa, Artificial Sequence
  Synthetic Construct
NYAMS

SEQ ID NO: 46 - protein, 5 aa, Artificial Sequence
  Synthetic Construct
RSAMN

SEQ ID NO: 47 - protein, 5 aa, Artificial Sequence
  Synthetic Construct
NYNIH

SEQ ID NO: 48 - protein, 5 aa, Artificial Sequence
  Synthetic Construct
DYAMN

SEQ ID NO: 49 - protein, 5 aa, Artificial Sequence
  Synthetic Construct
SHFWS

SEQ ID NO: 50 - protein, 5 aa, Artificial Sequence
  Synthetic Construct
SDAMY

SEQ ID NO: 51 - protein, 5 aa, Artificial Sequence
  Synthetic Construct
DYTMH

SEQ ID NO: 52 - protein, 5 aa, Artificial Sequence
  Synthetic Construct
NYNIN

SEQ ID NO: 53 - protein, 5 aa, Artificial Sequence
  Synthetic Construct
SSYWT

SEQ ID NO: 54 - protein, 5 aa, Artificial Sequence
  Synthetic Construct
DYNIH

SEQ ID NO: 55 - protein, 5 aa, Artificial Sequence
  Synthetic Construct
SSYIN

SEQ ID NO: 56 - protein, 5 aa, Artificial Sequence
  Synthetic Construct
HYGMN

SEQ ID NO: 57 - protein, 5 aa, Artificial Sequence
  Synthetic Construct
WYWLE

SEQ ID NO: 58 - protein, 6 aa, Artificial Sequence
  Synthetic Construct
SGYSWN

SEQ ID NO: 59 - protein, 5 aa, Artificial Sequence
  Synthetic Construct
SYWMS

SEQ ID NO: 60 - protein, 17 aa, Artificial Sequence
  Synthetic Construct
AITWNSGHIDYADSVEG

SEQ ID NO: 61 - protein, 17 aa, Artificial Sequence
  Synthetic Construct
AIYPGNGDTSYNQKFKG

SEQ ID NO: 62 - protein, 17 aa, Artificial Sequence
  Synthetic Construct
WINTYTGEPTYAADFKR

SEQ ID NO: 63 - protein, 17 aa, Artificial Sequence
  Synthetic Construct
IMSPVDSDIRYSPSFQG

SEQ ID NO: 64 - protein, 17 aa, Artificial Sequence
  Synthetic Construct
AINQDGSEKYYVGSVKG

SEQ ID NO: 65 - protein, 17 aa, Artificial Sequence
  Synthetic Construct
VINPMYGTTDYNQRFKG

SEQ ID NO: 66 - protein, 17 aa, Artificial Sequence
  Synthetic Construct
WISTYSGNTNYAQKLQG

SEQ ID NO: 67 - protein, 17 aa, Artificial Sequence
  Synthetic Construct
IIDPSNSYTRYSPSFQG

SEQ ID NO: 68 - protein, 17 aa, Artificial Sequence
  Synthetic Construct
YIYPRDDSPKYNENFKG

SEQ ID NO: 69 - protein, 17 aa, Artificial Sequence
  Synthetic Construct
QIFPASGSADYNEKFEG

SEQ ID NO: 70 - protein, 17 aa, Artificial Sequence
  Synthetic Construct
EIRSKSINSATHYAESV

SEQ ID NO: 71 - protein, 17 aa, Artificial Sequence
  Synthetic Construct
GFDPEENEIVYAQRFQG

SEQ ID NO: 72 - protein, 16 aa, Artificial Sequence
  Synthetic Construct
YISYSGITTYNPSLKS

SEQ ID NO: 73 - protein, 17 aa, Artificial Sequence
  Synthetic Construct
GISWNSGRIGYADSVKG

SEQ ID NO: 74 - protein, 17 aa, Artificial Sequence
  Synthetic Construct
FMSYDGSNKKYADSVKG

SEQ ID NO: 75 - protein, 17 aa, Artificial Sequence
  Synthetic Construct
WINTYIGEPIYADSVKG

SEQ ID NO: 76 - protein, 17 aa, Artificial Sequence
  Synthetic Construct
YISSDSSAIYYADTVKG

SEQ ID NO: 77 - protein, 17 aa, Artificial Sequence
  Synthetic Construct
FISYDGNNKYYADSVKG

SEQ ID NO: 78 - protein, 17 aa, Artificial Sequence
  Synthetic Construct
YINPYDDDTTYNQKFKG

SEQ ID NO: 79 - protein, 17 aa, Artificial Sequence
  Synthetic Construct
WISPYGGSTYYADSVKG

SEQ ID NO: 80 - protein, 17 aa, Artificial Sequence
  Synthetic Construct
NIKQDGSEKYYVDSVKG

SEQ ID NO: 81 - protein, 17 aa, Artificial Sequence
  Synthetic Construct
VIWYDGSKRYYADSVKG

SEQ ID NO: 82 - protein, 17 aa, Artificial Sequence
  Synthetic Construct
GINPSNGGTNFNEKFKN

SEQ ID NO: 83 - protein, 17 aa, Artificial Sequence
  Synthetic Construct
IIWYDGDNQYYADSVKG

SEQ ID NO: 84 - protein, 17 aa, Artificial Sequence
  Synthetic Construct
TISWNSGSIGYADSVKG

SEQ ID NO: 85 - protein, 17 aa, Artificial Sequence
  Synthetic Construct
GIYPGNGDTSYNQKFKG

SEQ ID NO: 86 - protein, 19 aa, Artificial Sequence
  Synthetic Construct
FIRDKAKGYTTEYNPSVKG

SEQ ID NO: 87 - protein, 17 aa, Artificial Sequence
  Synthetic Construct
VIGPSGGFTFYADSVKG

SEQ ID NO: 88 - protein, 17 aa, Artificial Sequence
  Synthetic Construct
RIDPANGYTKYDPKFQG

SEQ ID NO: 89 - protein, 17 aa, Artificial Sequence
  Synthetic Construct
EILPGSGSTEYTENFKD

SEQ ID NO: 90 - protein, 16 aa, Artificial Sequence
  Synthetic Construct
FISYSGITNYNPSLQG

SEQ ID NO: 91 - protein, 17 aa, Artificial Sequence
  Synthetic Construct
IIYPGDSDIRYSPSFQG

SEQ ID NO: 92 - protein, 17 aa, Artificial Sequence
  Synthetic Construct
GIIPMFGTAKYSQNFQG

SEQ ID NO: 93 - protein, 17 aa, Artificial Sequence
  Synthetic Construct
AIYPGNSDTSYNQKFEG

SEQ ID NO: 94 - protein, 17 aa, Artificial Sequence
  Synthetic Construct
YINPSTGYTEYNQKFKD

SEQ ID NO: 95 - protein, 17 aa, Artificial Sequence
  Synthetic Construct
SISGSGGNTYYADSVKG

SEQ ID NO: 96 - protein, 17 aa, Artificial Sequence
  Synthetic Construct
TISGSGGTTNYADSVKG

SEQ ID NO: 97 - protein, 17 aa, Artificial Sequence
  Synthetic Construct
TIYPGDGDTGYAQKFQG

SEQ ID NO: 98 - protein, 17 aa, Artificial Sequence
  Synthetic Construct
GISGGGRDTYFADSVKG

SEQ ID NO: 99 - protein, 17 aa, Artificial Sequence
  Synthetic Construct
YISSGGGITYFPDTVQG

SEQ ID NO: 100 - protein, 17 aa, Artificial Sequence
  Synthetic Construct
GVIPIVDIANYAQRFKG

SEQ ID NO: 101 - protein, 16 aa, Artificial Sequence
  Synthetic Construct
MIWGDGRIDYADALKS

SEQ ID NO: 102 - protein, 17 aa, Artificial Sequence
  Synthetic Construct
MIDPSDGETRLNQRFQG

SEQ ID NO: 103 - protein, 17 aa, Artificial Sequence
  Synthetic Construct
YIYPGNGATNYNQKFQG

SEQ ID NO: 104 - protein, 17 aa, Artificial Sequence
  Synthetic Construct
IIWYDGSNKYYADSVKG

SEQ ID NO: 105 - protein, 17 aa, Artificial Sequence
  Synthetic Construct
GIHWHGKRTGYADSVKG

SEQ ID NO: 106 - protein, 17 aa, Artificial Sequence
  Synthetic Construct
TISSGGSHTYYLDSVKG

SEQ ID NO: 107 - protein, 17 aa, Artificial Sequence
  Synthetic Construct
GISGSGGRTYYADSVKG

SEQ ID NO: 108 - protein, 17 aa, Artificial Sequence
  Synthetic Construct
AIYPGNGDAPYSQKFQG

SEQ ID NO: 109 - protein, 17 aa, Artificial Sequence
  Synthetic Construct
AISGDGGSTYYADSVKG

SEQ ID NO: 110 - protein, 17 aa, Artificial Sequence
  Synthetic Construct
GFDPEDGETIYAQKFQG

SEQ ID NO: 111 - protein, 16 aa, Artificial Sequence
  Synthetic Construct
YILYTGGTSFNPSLKS

SEQ ID NO: 112 - protein, 17 aa, Artificial Sequence
  Synthetic Construct
VIYYDGNYQYYEDSVKG

SEQ ID NO: 113 - protein, 17 aa, Artificial Sequence
  Synthetic Construct
GISWNSGSIGYADSVKG

SEQ ID NO: 114 - protein, 17 aa, Artificial Sequence
  Synthetic Construct
VISWNSDSIGYADSVKG

SEQ ID NO: 115 - protein, 17 aa, Artificial Sequence
  Synthetic Construct
LISGSSSYIYYADSVKG

SEQ ID NO: 116 - protein, 16 aa, Artificial Sequence
  Synthetic Construct
YIYYSGSSNYNPSLKS

SEQ ID NO: 117 - protein, 17 aa, Artificial Sequence
  Synthetic Construct
VISFDGSIKYSVDSVKG

SEQ ID NO: 118 - protein, 17 aa, Artificial Sequence
  Synthetic Construct
TINPVSGSTSYAQKFQG

SEQ ID NO: 119 - protein, 17 aa, Artificial Sequence
  Synthetic Construct
YIYPNNGDNGYNQKFRG

SEQ ID NO: 120 - protein, 17 aa, Artificial Sequence
  Synthetic Construct
EIDPGTFTTNYNEKFKA

SEQ ID NO: 121 - protein, 16 aa, Artificial Sequence
  Synthetic Construct
SITYDGSTNYADSVKG

SEQ ID NO: 122 - protein, 17 aa, Artificial Sequence
  Synthetic Construct
VISYEESNRYHADSVKG

SEQ ID NO: 123 - protein, 12 aa, Artificial Sequence
  Synthetic Construct
VSYLSTASSLDY

SEQ ID NO: 124 - protein, 12 aa, Artificial Sequence
  Synthetic Construct
STYYGGDWYFNV

SEQ ID NO: 125 - protein, 14 aa, Artificial Sequence
  Synthetic Construct
YPHYYGSSHWYFDV

SEQ ID NO: 126 - protein, 10 aa, Artificial Sequence
  Synthetic Construct
RRPGQGYFDF

SEQ ID NO: 127 - protein, 18 aa, Artificial Sequence
  Synthetic Construct
DYYDILTDYYIHYWYFDL

SEQ ID NO: 128 - protein, 10 aa, Artificial Sequence
  Synthetic Construct
YDYFTGTGVY

SEQ ID NO: 129 - protein, 7 aa, Artificial Sequence
  Synthetic Construct
RQLYFDY

SEQ ID NO: 130 - protein, 8 aa, Artificial Sequence
  Synthetic Construct
WYYKPFDV

SEQ ID NO: 131 - protein, 11 aa, Artificial Sequence
  Synthetic Construct
PDRSGYAWFIY

SEQ ID NO: 132 - protein, 7 aa, Artificial Sequence
  Synthetic Construct
GGGGFAY

SEQ ID NO: 133 - protein, 9 aa, Artificial Sequence
  Synthetic Construct
NYYGSTYDY

SEQ ID NO: 134 - protein, 11 aa, Artificial Sequence
  Synthetic Construct
VGSFSPLTLGL

SEQ ID NO: 135 - protein, 10 aa, Artificial Sequence
  Synthetic Construct
SLARTTAMDY

SEQ ID NO: 136 - protein, 7 aa, Artificial Sequence
  Synthetic Construct
GRDSFDI

SEQ ID NO: 137 - protein, 17 aa, Artificial Sequence
  Synthetic Construct
DRGIAAGGNYYYYGMDV

SEQ ID NO: 138 - protein, 9 aa, Artificial Sequence
  Synthetic Construct
GYRSYAMDY

SEQ ID NO: 139 - protein, 13 aa, Artificial Sequence
  Synthetic Construct
GRENIYYGSRLDY

SEQ ID NO: 140 - protein, 9 aa, Artificial Sequence
  Synthetic Construct
TGWLGPFDY

SEQ ID NO: 141 - protein, 15 aa, Artificial Sequence
  Synthetic Construct
RGNSYDGYFDYSMDY

SEQ ID NO: 142 - protein, 9 aa, Artificial Sequence
  Synthetic Construct
RHWPGGFDY

SEQ ID NO: 143 - protein, 12 aa, Artificial Sequence
  Synthetic Construct
EGGWFGELAFDY

SEQ ID NO: 144 - protein, 4 aa, Artificial Sequence
  Synthetic Construct
NDDY

SEQ ID NO: 145 - protein, 11 aa, Artificial Sequence
  Synthetic Construct
RDYRFDMGFDY

SEQ ID NO: 146 - protein, 9 aa, Artificial Sequence
  Synthetic Construct
DLRTGPFDY

SEQ ID NO: 147 - protein, 13 aa, Artificial Sequence
  Synthetic Construct
VVYYSNSYWYFDV

SEQ ID NO: 148 - protein, 13 aa, Artificial Sequence
  Synthetic Construct
DIQYGNYYYGMDV

SEQ ID NO: 149 - protein, 9 aa, Artificial Sequence
  Synthetic Construct
YDYNYAMDY

SEQ ID NO: 150 - protein, 10 aa, Artificial Sequence
  Synthetic Construct
EGHTAAPFDY

SEQ ID NO: 151 - protein, 9 aa, Artificial Sequence
  Synthetic Construct
EGDNDAFDI

SEQ ID NO: 152 - protein, 14 aa, Artificial Sequence
  Synthetic Construct
EGYYGNYGVYAMDY

SEQ ID NO: 153 - protein, 13 aa, Artificial Sequence
  Synthetic Construct
YFFGSSPNWYFDV

SEQ ID NO: 154 - protein, 8 aa, Artificial Sequence
  Synthetic Construct
HDIEGFDY

SEQ ID NO: 155 - protein, 14 aa, Artificial Sequence
  Synthetic Construct
SRDLLLFPHHALSP

SEQ ID NO: 156 - protein, 8 aa, Artificial Sequence
  Synthetic Construct
DYGYYFDF

SEQ ID NO: 157 - protein, 7 aa, Artificial Sequence
  Synthetic Construct
GGGVFDY

SEQ ID NO: 158 - protein, 16 aa, Artificial Sequence
  Synthetic Construct
DRLSITIRPRYYGLDV

SEQ ID NO: 159 - protein, 9 aa, Artificial Sequence
  Synthetic Construct
DSNWGNFDL

SEQ ID NO: 160 - protein, 11 aa, Artificial Sequence
  Synthetic Construct
GDYYGSNSLDY

SEQ ID NO: 161 - protein, 8 aa, Artificial Sequence
  Synthetic Construct
WGNIYFDY

SEQ ID NO: 162 - protein, 11 aa, Artificial Sequence
  Synthetic Construct
HYFGSSGPFAY

SEQ ID NO: 163 - protein, 11 aa, Artificial Sequence
  Synthetic Construct
TLGLVLDAMDY

SEQ ID NO: 164 - protein, 10 aa, Artificial Sequence
  Synthetic Construct
DGYFPYAMDF

SEQ ID NO: 165 - protein, 14 aa, Artificial Sequence
  Synthetic Construct
LKEYGNYDSFYFDV

SEQ ID NO: 166 - protein, 8 aa, Artificial Sequence
  Synthetic Construct
GDSVPFAY

SEQ ID NO: 167 - protein, 14 aa, Artificial Sequence
  Synthetic Construct
VATSGDFDYYGMDV

SEQ ID NO: 168 - protein, 11 aa, Artificial Sequence
  Synthetic Construct
GGMSTGDWFDP

SEQ ID NO: 169 - protein, 9 aa, Artificial Sequence
  Synthetic Construct
LFTGYAMDY

SEQ ID NO: 170 - protein, 13 aa, Artificial Sequence
  Synthetic Construct
DSYTTSWYGGMDV

SEQ ID NO: 171 - protein, 9 aa, Artificial Sequence
  Synthetic Construct
ANWDVAFAY

SEQ ID NO: 172 - protein, 17 aa, Artificial Sequence
  Synthetic Construct
DLRNTIFGVVIPDAFDI

SEQ ID NO: 173 - protein, 10 aa, Artificial Sequence
  Synthetic Construct
IFGVVTNFDN

SEQ ID NO: 174 - protein, 18 aa, Artificial Sequence
  Synthetic Construct
ARSGITFTGIIVPGSFDI

SEQ ID NO: 175 - protein, 10 aa, Artificial Sequence
  Synthetic Construct
LNWDYWYLDL

SEQ ID NO: 176 - protein, 14 aa, Artificial Sequence
  Synthetic Construct
DNSGYGHYYYGMDV

SEQ ID NO: 177 - protein, 18 aa, Artificial Sequence
  Synthetic Construct
DNHYGSGSYYYYQYGMDV

SEQ ID NO: 178 - protein, 10 aa, Artificial Sequence
  Synthetic Construct
RTLSYYVMDV

SEQ ID NO: 179 - protein, 12 aa, Artificial Sequence
  Synthetic Construct
EGNVDTTMIFDY

SEQ ID NO: 180 - protein, 21 aa, Artificial Sequence
  Synthetic Construct
DRLNYYDSSGYYHYKYYGMAV

SEQ ID NO: 181 - protein, 6 aa, Artificial Sequence
  Synthetic Construct
GGWFDY

SEQ ID NO: 182 - protein, 14 aa, Artificial Sequence
  Synthetic Construct
YPYYYGTSHWYFDV

SEQ ID NO: 183 - protein, 14 aa, Artificial Sequence
  Synthetic Construct
FSHFSGSNYDYFDY

SEQ ID NO: 184 - protein, 12 aa, Artificial Sequence
  Synthetic Construct
GSHYFGHWHFAV

SEQ ID NO: 185 - protein, 11 aa, Artificial Sequence
  Synthetic Construct
DGGIAAPGPDY

SEQ ID NO: 186 - protein, 11 aa, Artificial Sequence
  Synthetic Construct
RASQGIRNYLA

SEQ ID NO: 187 - protein, 10 aa, Artificial Sequence
  Synthetic Construct
RASSSVSYIH

SEQ ID NO: 188 - protein, 11 aa, Artificial Sequence
  Synthetic Construct
SASQDISNYLN

SEQ ID NO: 189 - protein, 11 aa, Artificial Sequence
  Synthetic Construct
RASQGISSWLA

SEQ ID NO: 190 - protein, 12 aa, Artificial Sequence
  Synthetic Construct
RASQSVSSSYLA

SEQ ID NO: 191 - protein, 16 aa, Artificial Sequence
  Synthetic Construct
RSSRSLVHSRGNTYLH

SEQ ID NO: 192 - protein, 11 aa, Artificial Sequence
  Synthetic Construct
RASQSVSSNLA

SEQ ID NO: 193 - protein, 13 aa, Artificial Sequence
  Synthetic Construct
TGSSNIGSGYDVH

SEQ ID NO: 194 - protein, 11 aa, Artificial Sequence
  Synthetic Construct
KASRDVAIAVA

SEQ ID NO: 195 - protein, 11 aa, Artificial Sequence
  Synthetic Construct
RTSENIYSYLA

SEQ ID NO: 196 - protein, 11 aa, Artificial Sequence
  Synthetic Construct
RASQFVGSSIH

SEQ ID NO: 197 - protein, 14 aa, Artificial Sequence
  Synthetic Construct
TGSGSNIGAPYDVS

SEQ ID NO: 198 - protein, 11 aa, Artificial Sequence
  Synthetic Construct
RASQDISSYLN

SEQ ID NO: 199 - protein, 11 aa, Artificial Sequence
  Synthetic Construct
RASQSVYSYLA

SEQ ID NO: 200 - protein, 11 aa, Artificial Sequence
  Synthetic Construct
KASQNVGTNVA

SEQ ID NO: 201 - protein, 11 aa, Artificial Sequence
  Synthetic Construct
KASQNVDTNVA

SEQ ID NO: 202 - protein, 12 aa, Artificial Sequence
  Synthetic Construct
RASQSVGSSYLA

SEQ ID NO: 203 - protein, 11 aa, Artificial Sequence
  Synthetic Construct
RASQNVGTAVA

SEQ ID NO: 204 - protein, 11 aa, Artificial Sequence
  Synthetic Construct
RASQDVSTAVA

SEQ ID NO: 205 - protein, 12 aa, Artificial Sequence
  Synthetic Construct
RASQRVSSSYLA

SEQ ID NO: 206 - protein, 11 aa, Artificial Sequence
  Synthetic Construct
RASQSVSSYLA

SEQ ID NO: 207 - protein, 15 aa, Artificial Sequence
  Synthetic Construct
RASKGVSTSGYSYLH

SEQ ID NO: 208 - protein, 11 aa, Artificial Sequence
  Synthetic Construct
RASQSIGSSLH

SEQ ID NO: 209 - protein, 10 aa, Artificial Sequence
  Synthetic Construct
RASSSVSYMH

SEQ ID NO: 210 - protein, 11 aa, Artificial Sequence
  Synthetic Construct
KASQNIDKYLN

SEQ ID NO: 211 - protein, 11 aa, Artificial Sequence
  Synthetic Construct
KTSQDINKYMA

SEQ ID NO: 212 - protein, 11 aa, Artificial Sequence
  Synthetic Construct
GASENIYGALN

SEQ ID NO: 213 - protein, 11 aa, Artificial Sequence
  Synthetic Construct
QASTDISSHLN

SEQ ID NO: 214 - protein, 12 aa, Artificial Sequence
  Synthetic Construct
RASQSVSSSFFA

SEQ ID NO: 215 - protein, 11 aa, Artificial Sequence
  Synthetic Construct
QGDSLRSYYAS

SEQ ID NO: 216 - protein, 10 aa, Artificial Sequence
  Synthetic Construct
SASSSRSYMQ

SEQ ID NO: 217 - protein, 10 aa, Artificial Sequence
  Synthetic Construct
SASSSISYMH

SEQ ID NO: 218 - protein, 16 aa, Artificial Sequence
  Synthetic Construct
RSSQSLLYSIGYNYLD

SEQ ID NO: 219 - protein, 17 aa, Artificial Sequence
  Synthetic Construct
KSSQSVLYRSNNRNFLG

SEQ ID NO: 220 - protein, 11 aa, Artificial Sequence
  Synthetic Construct
KASQDVSTVVA

SEQ ID NO: 221 - protein, 11 aa, Artificial Sequence
  Synthetic Construct
RASLSINTFLN

SEQ ID NO: 222 - protein, 11 aa, Artificial Sequence
  Synthetic Construct
RASENIFSYLA

SEQ ID NO: 223 - protein, 12 aa, Artificial Sequence
  Synthetic Construct
RASQSLGSSYLA

SEQ ID NO: 224 - protein, 15 aa, Artificial Sequence
  Synthetic Construct
RASESVDSYGQSYMH

SEQ ID NO: 225 - protein, 11 aa, Artificial Sequence
  Synthetic Construct
HASQNIDVWLS

SEQ ID NO: 226 - protein, 10 aa, Artificial Sequence
  Synthetic Construct
SAHSSVSFMH

SEQ ID NO: 227 - protein, 11 aa, Artificial Sequence
  Synthetic Construct
RASQRISTYLA

SEQ ID NO: 228 - protein, 11 aa, Artificial Sequence
  Synthetic Construct
RASQSINSYLN

SEQ ID NO: 229 - protein, 12 aa, Artificial Sequence
  Synthetic Construct
TASSSVSSSYLH

SEQ ID NO: 230 - protein, 11 aa, Artificial Sequence
  Synthetic Construct
RASQGIFSWLA

SEQ ID NO: 231 - protein, 11 aa, Artificial Sequence
  Synthetic Construct
KASQDIDRYMA

SEQ ID NO: 232 - protein, 11 aa, Artificial Sequence
  Synthetic Construct
RASQSIRSWLA

SEQ ID NO: 233 - protein, 11 aa, Artificial Sequence
  Synthetic Construct
RASQAIRNDLG

SEQ ID NO: 234 - protein, 11 aa, Artificial Sequence
  Synthetic Construct
RASQSISSYLN

SEQ ID NO: 235 - protein, 11 aa, Artificial Sequence
  Synthetic Construct
RASQGISNYLA

SEQ ID NO: 236 - protein, 11 aa, Artificial Sequence
  Synthetic Construct
RASQGIRNDLG

SEQ ID NO: 237 - protein, 13 aa, Artificial Sequence
  Synthetic Construct
SGSSSNIGNNYVS

SEQ ID NO: 238 - protein, 14 aa, Artificial Sequence
  Synthetic Construct
TGTSSDVGSYNYVN

SEQ ID NO: 239 - protein, 15 aa, Artificial Sequence
  Synthetic Construct
RASESVDNYGHSFMH

SEQ ID NO: 240 - protein, 11 aa, Artificial Sequence
  Synthetic Construct
RASQSIGTNIH

SEQ ID NO: 241 - protein, 15 aa, Artificial Sequence
  Synthetic Construct
RASQSVDYDGDSYMN

SEQ ID NO: 242 - protein, 16 aa, Artificial Sequence
  Synthetic Construct
RSSQSLLYSNGYNYLD

SEQ ID NO: 243 - protein, 7 aa, Artificial Sequence
  Synthetic Construct
AASTLQS

SEQ ID NO: 244 - protein, 7 aa, Artificial Sequence
  Synthetic Construct
ATSNLAS

SEQ ID NO: 245 - protein, 7 aa, Artificial Sequence
  Synthetic Construct
FTSSLHS

SEQ ID NO: 246 - protein, 7 aa, Artificial Sequence
  Synthetic Construct
AASSLQS

SEQ ID NO: 247 - protein, 7 aa, Artificial Sequence
  Synthetic Construct
GASSRAT

SEQ ID NO: 248 - protein, 7 aa, Artificial Sequence
  Synthetic Construct
KVSNRFI

SEQ ID NO: 249 - protein, 7 aa, Artificial Sequence
  Synthetic Construct
DASTRAT

SEQ ID NO: 250 - protein, 7 aa, Artificial Sequence
  Synthetic Construct
GNSKRPS

SEQ ID NO: 251 - protein, 7 aa, Artificial Sequence
  Synthetic Construct
WASTRHT

SEQ ID NO: 252 - protein, 7 aa, Artificial Sequence
  Synthetic Construct
NAKTLAE

SEQ ID NO: 253 - protein, 7 aa, Artificial Sequence
  Synthetic Construct
YASESMS

SEQ ID NO: 254 - protein, 7 aa, Artificial Sequence
  Synthetic Construct
HNNKRPS

SEQ ID NO: 255 - protein, 7 aa, Artificial Sequence
  Synthetic Construct
YTSRLHS

SEQ ID NO: 256 - protein, 7 aa, Artificial Sequence
  Synthetic Construct
GASSLES

SEQ ID NO: 257 - protein, 7 aa, Artificial Sequence
  Synthetic Construct
DASNRAT

SEQ ID NO: 258 - protein, 7 aa, Artificial Sequence
  Synthetic Construct
SASFLYS

SEQ ID NO: 259 - protein, 7 aa, Artificial Sequence
  Synthetic Construct
SASYRYS

SEQ ID NO: 260 - protein, 7 aa, Artificial Sequence
  Synthetic Construct
GAFSRAT

SEQ ID NO: 261 - protein, 7 aa, Artificial Sequence
  Synthetic Construct
SASNRYT

SEQ ID NO: 262 - protein, 7 aa, Artificial Sequence
  Synthetic Construct
DASSRAT

SEQ ID NO: 263 - protein, 7 aa, Artificial Sequence
  Synthetic Construct
LASYLES

SEQ ID NO: 264 - protein, 7 aa, Artificial Sequence
  Synthetic Construct
YASQSFS

SEQ ID NO: 265 - protein, 7 aa, Artificial Sequence
  Synthetic Construct
APSNLAS

SEQ ID NO: 266 - protein, 7 aa, Artificial Sequence
  Synthetic Construct
NTNNLQT

SEQ ID NO: 267 - protein, 7 aa, Artificial Sequence
  Synthetic Construct
YTSALQP

SEQ ID NO: 268 - protein, 7 aa, Artificial Sequence
  Synthetic Construct
GATNLAD

SEQ ID NO: 269 - protein, 7 aa, Artificial Sequence
  Synthetic Construct
YGSHLLS

SEQ ID NO: 270 - protein, 7 aa, Artificial Sequence
  Synthetic Construct
GKNNRPS

SEQ ID NO: 271 - protein, 7 aa, Artificial Sequence
  Synthetic Construct
DTSKLAS

SEQ ID NO: 272 - protein, 7 aa, Artificial Sequence
  Synthetic Construct
TTSNLAS

SEQ ID NO: 273 - protein, 7 aa, Artificial Sequence
  Synthetic Construct
RNHQRPS

SEQ ID NO: 274 - protein, 7 aa, Artificial Sequence
  Synthetic Construct
WASTRES

SEQ ID NO: 275 - protein, 7 aa, Artificial Sequence
  Synthetic Construct
SASYRYI

SEQ ID NO: 276 - protein, 7 aa, Artificial Sequence
  Synthetic Construct
AASSLHG

SEQ ID NO: 277 - protein, 7 aa, Artificial Sequence
  Synthetic Construct
NTKTLAE

SEQ ID NO: 278 - protein, 7 aa, Artificial Sequence
  Synthetic Construct
GASSRAP

SEQ ID NO: 279 - protein, 7 aa, Artificial Sequence
  Synthetic Construct
LASNLES

SEQ ID NO: 280 - protein, 7 aa, Artificial Sequence
  Synthetic Construct
KASNLHT

SEQ ID NO: 281 - protein, 7 aa, Artificial Sequence
  Synthetic Construct
STSSLAS

SEQ ID NO: 282 - protein, 7 aa, Artificial Sequence
  Synthetic Construct
DASKRAT

SEQ ID NO: 283 - protein, 7 aa, Artificial Sequence
  Synthetic Construct
VASSLQS

SEQ ID NO: 284 - protein, 7 aa, Artificial Sequence
  Synthetic Construct
STSNLAS

SEQ ID NO: 285 - protein, 7 aa, Artificial Sequence
  Synthetic Construct
DTSTLQS

SEQ ID NO: 286 - protein, 7 aa, Artificial Sequence
  Synthetic Construct
KASSLES

SEQ ID NO: 287 - protein, 7 aa, Artificial Sequence
  Synthetic Construct
AAFNLQS

SEQ ID NO: 288 - protein, 7 aa, Artificial Sequence
  Synthetic Construct
GASTRAT

SEQ ID NO: 289 - protein, 7 aa, Artificial Sequence
  Synthetic Construct
DNNKRPS

SEQ ID NO: 290 - protein, 7 aa, Artificial Sequence
  Synthetic Construct
GVSKRPS

SEQ ID NO: 291 - protein, 7 aa, Artificial Sequence
  Synthetic Construct
DASSLEQ

SEQ ID NO: 292 - protein, 7 aa, Artificial Sequence
  Synthetic Construct
YASESIS

SEQ ID NO: 293 - protein, 7 aa, Artificial Sequence
  Synthetic Construct
AASYLES

SEQ ID NO: 294 - protein, 7 aa, Artificial Sequence
  Synthetic Construct
LGSNRAS

SEQ ID NO: 295 - protein, 9 aa, Artificial Sequence
  Synthetic Construct
QRYNRAPYT

SEQ ID NO: 296 - protein, 9 aa, Artificial Sequence
  Synthetic Construct
QQWTSNPPT

SEQ ID NO: 297 - protein, 9 aa, Artificial Sequence
  Synthetic Construct
QQYSTVPWT

SEQ ID NO: 298 - protein, 9 aa, Artificial Sequence
  Synthetic Construct
QQYNIYPYT

SEQ ID NO: 299 - protein, 9 aa, Artificial Sequence
  Synthetic Construct
QQYGSSPCT

SEQ ID NO: 300 - protein, 9 aa, Artificial Sequence
  Synthetic Construct
SQSTHLPFT

SEQ ID NO: 301 - protein, 9 aa, Artificial Sequence
  Synthetic Construct
QQYDNWPLT

SEQ ID NO: 302 - protein, 11 aa, Artificial Sequence
  Synthetic Construct
ASWTDGLSLVV

SEQ ID NO: 303 - protein, 9 aa, Artificial Sequence
  Synthetic Construct
HQYSSYPFT

SEQ ID NO: 304 - protein, 9 aa, Artificial Sequence
  Synthetic Construct
QHHYGIPFT

SEQ ID NO: 305 - protein, 9 aa, Artificial Sequence
  Synthetic Construct
QQSHSWPFT

SEQ ID NO: 306 - protein, 11 aa, Artificial Sequence
  Synthetic Construct
ATVEAGLSGSV

SEQ ID NO: 307 - protein, 9 aa, Artificial Sequence
  Synthetic Construct
QQGNTLPYT

SEQ ID NO: 308 - protein, 9 aa, Artificial Sequence
  Synthetic Construct
QQANSFPYT

SEQ ID NO: 309 - protein, 10 aa, Artificial Sequence
  Synthetic Construct
QQRSNWPPFT

SEQ ID NO: 310 - protein, 9 aa, Artificial Sequence
  Synthetic Construct
QQYNIYPLT

SEQ ID NO: 311 - protein, 9 aa, Artificial Sequence
  Synthetic Construct
QQYNNYPFT

SEQ ID NO: 312 - protein, 9 aa, Artificial Sequence
  Synthetic Construct
QQYGSSPWT

SEQ ID NO: 313 - protein, 10 aa, Artificial Sequence
  Synthetic Construct
QQYTNYPMYT

SEQ ID NO: 314 - protein, 9 aa, Artificial Sequence
  Synthetic Construct
QQYLYHPAT

SEQ ID NO: 315 - protein, 9 aa, Artificial Sequence
  Synthetic Construct
QQYGSLPWT

SEQ ID NO: 316 - protein, 9 aa, Artificial Sequence
  Synthetic Construct
QQSSNWPRT

SEQ ID NO: 317 - protein, 9 aa, Artificial Sequence
  Synthetic Construct
QHSRDLPLT

SEQ ID NO: 318 - protein, 9 aa, Artificial Sequence
  Synthetic Construct
HQSSSLPFT

SEQ ID NO: 319 - protein, 9 aa, Artificial Sequence
  Synthetic Construct
QQWSFNPPT

SEQ ID NO: 320 - protein, 9 aa, Artificial Sequence
  Synthetic Construct
QQRSNWPIT

SEQ ID NO: 321 - protein, 9 aa, Artificial Sequence
  Synthetic Construct
QQWTFNPPT

SEQ ID NO: 322 - protein, 9 aa, Artificial Sequence
  Synthetic Construct
LQHISRPRT

SEQ ID NO: 323 - protein, 10 aa, Artificial Sequence
  Synthetic Construct
QQRSNWPMYT

SEQ ID NO: 324 - protein, 8 aa, Artificial Sequence
  Synthetic Construct
LQYDNLWT

SEQ ID NO: 325 - protein, 9 aa, Artificial Sequence
  Synthetic Construct
QNVLNTPLT

SEQ ID NO: 326 - protein, 9 aa, Artificial Sequence
  Synthetic Construct
GQGNRLPYT

SEQ ID NO: 327 - protein, 9 aa, Artificial Sequence
  Synthetic Construct
QQYDSSAIT

SEQ ID NO: 328 - protein, 11 aa, Artificial Sequence
  Synthetic Construct
SSRDSSGNHWV

SEQ ID NO: 329 - protein, 7 aa, Artificial Sequence
  Synthetic Construct
HQRSSYT

SEQ ID NO: 330 - protein, 9 aa, Artificial Sequence
  Synthetic Construct
HQRSTYPLT

SEQ ID NO: 331 - protein, 9 aa, Artificial Sequence
  Synthetic Construct
MQALQTPYT

SEQ ID NO: 332 - protein, 9 aa, Artificial Sequence
  Synthetic Construct
QQYYTTPYT

SEQ ID NO: 333 - protein, 9 aa, Artificial Sequence
  Synthetic Construct
QQHYSPPYT

SEQ ID NO: 334 - protein, 9 aa, Artificial Sequence
  Synthetic Construct
QQSSNTPFT

SEQ ID NO: 335 - protein, 9 aa, Artificial Sequence
  Synthetic Construct
QHHYGTPFT

SEQ ID NO: 336 - protein, 9 aa, Artificial Sequence
  Synthetic Construct
QQYADSPIT

SEQ ID NO: 337 - protein, 9 aa, Artificial Sequence
  Synthetic Construct
QQNAEDSRT

SEQ ID NO: 338 - protein, 9 aa, Artificial Sequence
  Synthetic Construct
QQAHSYPFT

SEQ ID NO: 339 - protein, 9 aa, Artificial Sequence
  Synthetic Construct
QQRSSFPLT

SEQ ID NO: 340 - protein, 9 aa, Artificial Sequence
  Synthetic Construct
QQRSNWPLT

SEQ ID NO: 341 - protein, 10 aa, Artificial Sequence
  Synthetic Construct
QQSYSTPPIT

SEQ ID NO: 342 - protein, 10 aa, Artificial Sequence
  Synthetic Construct
HQYYRLPPIT

SEQ ID NO: 343 - protein, 9 aa, Artificial Sequence
  Synthetic Construct
QQANSVPIT

SEQ ID NO: 344 - protein, 9 aa, Artificial Sequence
  Synthetic Construct
QQYNSYSYT

SEQ ID NO: 345 - protein, 9 aa, Artificial Sequence
  Synthetic Construct
QQYNRYPWT

SEQ ID NO: 346 - protein, 9 aa, Artificial Sequence
  Synthetic Construct
QHYINWPLT

SEQ ID NO: 347 - protein, 9 aa, Artificial Sequence
  Synthetic Construct
QKYNSAPYT

SEQ ID NO: 348 - protein, 9 aa, Artificial Sequence
  Synthetic Construct
LQDFNYPWT

SEQ ID NO: 349 - protein, 11 aa, Artificial Sequence
  Synthetic Construct
GTWDSRLSAVV

SEQ ID NO: 350 - protein, 11 aa, Artificial Sequence
  Synthetic Construct
GTFAGGSYYGV

SEQ ID NO: 351 - protein, 9 aa, Artificial Sequence
  Synthetic Construct
QQYNEDPPT

SEQ ID NO: 352 - protein, 9 aa, Artificial Sequence
  Synthetic Construct
QQSWSWPTT

SEQ ID NO: 353 - protein, 9 aa, Artificial Sequence
  Synthetic Construct
QQSHEDPYT

SEQ ID NO: 354 - protein, 9 aa, Artificial Sequence
  Synthetic Construct
MQARQTPFT

SEQ ID NO: 355 - protein, 121 aa, Artificial Sequence [sequence omitted]

SEQ ID NO: 356 - protein, 121 aa, Artificial Sequence [sequence omitted]

SEQ ID NO: 357 - protein, 123 aa, Artificial Sequence [sequence omitted]

SEQ ID NO: 358 - protein, 119 aa, Artificial Sequence
  Synthetic Construct
EVQLVQSGAEVKKPGESLKISCKGSGYSFTTYWLGWVRQMPGKGLDWIGIMSPVDSDIRYSPSFQGQVTMSVDKSITTAYLQWNSLKASDTAMYYCARRRPGQGYFDFWGQGTLVTVSS

SEQ ID NO: 359 - protein, 127 aa, Artificial Sequence [sequence omitted]

SEQ ID NO: 360 - protein, 119 aa, Artificial Sequence
  Synthetic Construct
QVQLVQSGAEVKKPGSSVKVSCKASGYSFTDYHIHWVRQAPGQGLEWMGVINPMYGTTDYNQRFKGRVTITADESTSTAYMELSSLRSEDTAVYYCARYDYFTGTGVYWGQGTLVTVSS

SEQ ID NO: 361 - protein, 116 aa, Artificial Sequence
  Synthetic Construct
QVQLVQSGAEVKKPGASVKVSCKASGYTFTRYGISWVRQAPGQGLEWMGWISTYSGNTNYAQKLQGRVTMTTDTSTSTAYMELRSLRSDDTAVYYCARRQLYFDYWGQGTLVTVSS

SEQ ID NO: 362 - protein, 117 aa, Artificial Sequence
  Synthetic Construct
EVQLVQSGAEVKKPGESLKISCKGSGYSFSNYWIGWVRQMPGKGLEWMGIIDPSNSYTRYSPSFQGQVTISADKSISTAYLQWSSLKASDTAMYYCARWYYKPFDVWGQGTLVTVSS

SEQ ID NO: 363 - protein, 120 aa, Artificial Sequence
  Synthetic Construct
QVQLVQSGAEVKKPGSSVKVSCKASGYTFTDQTIHWMRQAPGQGLEWIGYIYPRDDSPKYNENFKGKVTITADKSTSTAYMELSSLRSEDTAVYYCAIPDRSGYAWFIYWGQGTLVTVSS

SEQ ID NO: 364 - protein, 116 aa, Artificial Sequence [sequence omitted]

SEQ ID NO: 365 - protein, 120 aa, Artificial Sequence
  Synthetic Construct
EVKLEESGGGLVQPGGSMKLSCVASGFIFSNHWMNWVRQSPEKGLEWVAEIRSKSINSATHYAESVKGRFTISRDDSKSAVYLQMTDLRTEDTGVYYCSRNYYGSTYDYWGQGTTLTVSS

SEQ ID NO: 366 - protein, 120 aa, Artificial Sequence
  Synthetic Construct
QVQLVQSGAEVKKPGASVKVSCKVSGYTLTELSIHWVRQAPGKGLEWMGGFDPEENEIVYAQRFQGRVTMTEDTSTDTAYMELSSLRSEDTAVYYCAIVGSFSPLTLGLWGQGTMVTVSS

SEQ ID NO: 367 - protein, 119 aa, Artificial Sequence
  Synthetic Construct
EVQLQESGPGLVRPSQTLSLTCTVSGYSITSDHAWSWVRQPPGRGLEWIGYISYSGITTYNPSLKSRVTMLRDTSKNQFSLRLSSVTAADTAVYYCARSLARTTAMDYWGQGSLVTVSS

SEQ ID NO: 368 - protein, 116 aa, Artificial Sequence
  Synthetic Construct
EVQLVESGGGLVQPGRSLRLSCAASRFTFDDYAMHWVRQAPGKGLEWVSGISWNSGRIGYADSVKGRFTISRDNAENSLFLQMNGLRAEDTALYYCAKGRDSFDIWGQGTMVTVSS

SEQ ID NO: 369 - protein, 126 aa, Artificial Sequence
  Synthetic Construct
QVQLVESGGGVVQPGRSLRLSCAASGFIFSSYAMHWVRQAPGNGLEWVAFMSYDGSNKKYADSVKGRFTISRDNSKNTLYLQMNSLRAEDTAVYYCARDRGIAAGGNYYYYGMDVWGQGTTVTVSS

SEQ ID NO: 370 - protein, 118 aa, Artificial Sequence
  Synthetic Construct
EVQLVESGGGLVQPGGSLRLSCAASGYVFTDYGMNWVRQAPGKGLEWMGWINTYIGEPIYADSVKGRFTFSLDTSKSTAYLQMNSLRAEDTAVYYCARGYRSYAMDYWGQGTLVTVSS

SEQ ID NO: 371 - protein, 122 aa, Artificial Sequence
  Synthetic Construct
EVQLVESGGGLVQPGGSLRLSCAASGFTFSSFGMHWVRQAPGKGLEWVAYISSDSSAIYYADTVKGRFTISRDNAKNSLYLQMNSLRDEDTAVYYCGRGRENIYYGSRLDYWGQGTTVTVSS

SEQ ID NO: 372 - protein, 118 aa, Artificial Sequence
  Synthetic Construct
QVQLVESGGGVVQPGRSLRLSCAASGFTFSSYTMHWVRQAPGKGLEWVTFISYDGNNKYYADSVKGRFTISRDNSKNTLYLQMNSLRAEDTAIYYCARTGWLGPFDYWGQGTLVTVSS

SEQ ID NO: 373 - protein, 124 aa, Artificial Sequence
  Synthetic Construct
QVQLQESGPGLVRPSQTLSLTCTASGYTFTDYVIHWVKQPPGRGLEWIGYINPYDDDTTYNQKFKGRVTMLVDTSSNTAYLRLSSVTAEDTAVYYCARRGNSYDGYFDYSMDYWGSGTPVTVSS

SEQ ID NO: 374 - protein, 118 aa, Artificial Sequence [sequence omitted]

SEQ ID NO: 375 - protein, 121 aa, Artificial Sequence
  Synthetic Construct
EVQLVESGGGLVQPGGSLRLSCAASGFTFSRYWMSWVRQAPGKGLEWVANIKQDGSEKYYVDSVKGRFTISRDNAKNSLYLQMNSLRAEDTAVYYCAREGGWFGELAFDYWGQGTLVTVSS

SEQ ID NO: 376 - protein, 113 aa, Artificial Sequence [sequence omitted]

SEQ ID NO: 377 - protein, 120 aa, Artificial Sequence [sequence omitted]

SEQ ID NO: 378 - protein, 118 aa, Artificial Sequence [sequence omitted]

SEQ ID NO: 379 - protein, 122 aa, Artificial Sequence [sequence omitted]

SEQ ID NO: 380 - protein, 122 aa, Artificial Sequence
  Synthetic Construct
EVQLVESGGGLVQPGRSLRLSCAASGFTFNDYAMHWVRQAPGKGLEWVSTISWNSGSIGYADSVKGRFTISRDNAKKSLYLQMNSLRAEDTALYYCAKDIQYGNYYYGMDVWGQGTTVTVSS

SEQ ID NO: 381 - protein, 118 aa, Artificial Sequence
  Synthetic Construct
QAYLQQSGAELVRPGASVKMSCKASGYTFTSYNMHWVKQTPRQGLEWIGGIYPGNGDTSYNQKFKGKATLTVGKSSSTAYMQLSSLTSEDSAVYFCARYDYNYAMDYWGQGTSVTVSS

SEQ ID NO: 382 - protein, 121 aa, Artificial Sequence
  Synthetic Construct
QVQLQESGPGLVRPSQTLSLTCTVSGFTFTDFYMNWVRQPPGRGLEWIGFIRDKAKGYTTEYNPSVKGRVTMLVDTSKNQFSLRLSSVTAADTAVYYCAREGHTAAPFDYWGQGSLVTVSS

SEQ ID NO: 383 - protein, 118 aa, Artificial Sequence [sequence omitted]

SEQ ID NO: 384 - protein, 123 aa, Artificial Sequence [sequence omitted]

SEQ ID NO: 385 - protein, 122 aa, Artificial Sequence [sequence omitted]

SEQ ID NO: 386 - protein, 119 aa, Artificial Sequence
  Synthetic Construct
QVQLQESGPGLVKPSETLSLTCAVSGHSISHDHAWSWVRQPPGEGLEWIGFISYSGITNYNPSLQGRVTISRDNSKNTLYLQMNSLRAEDTAVYYCARSLARTTAMDYWGEGTLVTVSS

SEQ ID NO: 387 - protein, 117 aa, Artificial Sequence [sequence omitted]

SEQ ID NO: 388 - protein, 123 aa, Artificial Sequence
  Synthetic Construct
QVQLQQSGAEVKKPGSSVRVSCKASGGTFNNNAINWVRQAPGQGLEWMGGIIPMFGTAKYSQNFQGRVAITADESTGTASMELSSLRSEDTAVYYCARSRDLLLFPHHALSPWGRGTMVTVSS

SEQ ID NO: 389 - protein, 115 aa, Artificial Sequence
  Synthetic Construct
QLQQSGTVLARPGASVKMSCKASGYSFTRYWMHWIKQRPGQGLEWIGAIYPGNSDTSYNQKFEGKAKLTAVTSASTAYMELSSLTHEDSAVYYCSRDYGYYFDFWGQGTTLTVSS

SEQ ID NO: 390 - protein, 116 aa, Artificial Sequence
  Synthetic Construct
QVQLVQSGAEVKKPGSSVKVSCKASGYTFTSYRMHWVRQAPGQGLEWIGYINPSTGYTEYNQKFKDKATITADESTNTAYMELSSLRSEDTAVYYCARGGGVFDYWGQGTLVTVSS

SEQ ID NO: 391 - protein, 125 aa, Artificial Sequence [sequence omitted]

SEQ ID NO: 392 - protein, 118 aa, Artificial Sequence [sequence omitted]

SEQ ID NO: 393 - protein, 120 aa, Artificial Sequence [sequence omitted]

SEQ ID NO: 394 - protein, 117 aa, Artificial Sequence [sequence omitted]

SEQ ID NO: 395 - protein, 120 aa, Artificial Sequence
  Synthetic Construct
EVQLQESGGVLVKPGGSLKLSCAASGFVFSSYDMSWVRQTPEKRLEWVAYISSGGGITYFPDTVQGRFTVSRDNAKNTLYLQMNSLKSEDTAIYYCAAHYFGSSGPFAYWGQGTLVTVSA

SEQ ID NO: 396 - protein, 120 aa, Artificial Sequence
  Synthetic Construct
QVQLVQSGAEVKKPGSSVKVSCKASGYTFSSNVISWVRQAPGQGLEWMGGVIPIVDIANYAQRFKGRVTITADESTSTTYMELSSLRSEDTAVYYCASTLGLVLDAMDYWGQGTLVTVSS

SEQ ID NO: 397 - protein, 118 aa, Artificial Sequence
  Synthetic Construct
EVQLKESGPGLVAPGGSLSITCTVSGFSLTDSSINWVRQPPGKGLEWLGMIWGDGRIDYADALKSRLSISKDSSKSQVFLEMTSLRTDDTATYYCARDGYFPYAMDFWGQGTSVTVSS

SEQ ID NO: 398 - protein, 123 aa, Artificial Sequence
  Synthetic Construct
QVQLQQSGPELVKPGASVKISCKASGYSFTSYWIHWIKQRPGQGLEWIGMIDPSDGETRLNQRFQGRATLTVDESTSTAYMQLRSPTSEDSAVYYCTRLKEYGNYDSFYFDVWGAGTLVTVSS

SEQ ID NO: 399 - protein, 117 aa, Artificial Sequence
  Synthetic Construct
QAQLQVSGAEVVKPGASVKMSCKASGYTFTSYNMHWVKQTPGQGLEWIGYIYPGNGATNYNQKFQGKATLTADTSSSTAYMQISSLTSEDSAVYFCARGDSVPFAYWGQGTLVTVSA

SEQ ID NO: 400 - protein, 117 aa, Artificial Sequence
  Synthetic Construct
QAQLQVSGAEVVKPGASVKMSCKASGYTFTSYNMHWVKQTPGQGLEWIGYIYPGNGATNYNQKFQGKATLTADPSSSTAYMQISSLTSEDSAVYFCARGDSVPFAYWGQGTLVTVSA

SEQ ID NO: 401 - protein, 123 aa, Artificial Sequence
  Synthetic Construct
QVQLVESGGGVVQPGRSLRLSCVASGFTFSSYGMHWVRQAPGKGLEWVAIIWYDGSNKYYADSVKGRFTISRDNSKNTQYLQMNSLRAEDTAVYYCASVATSGDFDYYGMDVWGQGTTVTVSS

SEQ ID NO: 402 - protein, 120 aa, Artificial Sequence
  Synthetic Construct
EVQLVESGGGVVRPGGSLRLSCAASGFTFDDYGMTWVRQAPGRGLEWVSGIHWHGKRTGYADSVKGRFTISRDNAKKSLYLQMNSLKGEDTALYHCVRGGMSTGDWFDPWGQGTLVIVSS

SEQ ID NO: 403 - protein, 118 aa, Artificial Sequence
  Synthetic Construct
EVMLVESGGALVKPGGSLKLSCAASGFTFSNYAMSWVRQIPEKRLEWVATISSGGSHTYYLDSVKGRFTISRDNARDTLYLQMSSLRSEDTALYYCARLFTGYAMDYWGQGTSVTVSS

SEQ ID NO: 404 - protein, 122 aa, Artificial Sequence
  Synthetic Construct
EVQLVESGGNLEQPGGSLRLSCTASGFTFSRSAMNWVRRAPGKGLEWVSGISGSGGRTYYADSVKGRFTISRDNSKNTLYLQMNSLSAEDTAAYYCAKDSYTTSWYGGMDVWGHGTTVTVSS

SEQ ID NO: 405 - protein, 118 aa, Artificial Sequence
  Synthetic Construct
QVQLVQSGAEVKKPGSSVKVSCKASGYIFTNYNIHWVKKSPGQGLEWIGAIYPGNGDAPYSQKFQGKATLTADTSTSTTYMELSSLRSEDTAVYYCVRANWDVAFAYWGQGTLVTVSS

SEQ ID NO: 406 - protein, 126 aa, Artificial Sequence
  Synthetic Construct
EVQLVESGGGVIQPGGSLRLSCAASGFTFDDYAMNWVRQGPGKGLEWVSAISGDGGSTYYADSVKGRFTISRDNSKNSLYLQMNSLRAEDTAFFYCAKDLRNTIFGVVIPDAFDIWGQGTMVTVSS

SEQ ID NO: 407 - protein, 119 aa, Artificial Sequence [sequence omitted]

SEQ ID NO: 408 - protein, 126 aa, Artificial Sequence
  Synthetic Construct
QVQLQESGPGLVKPSETLSLTCTVSGGSFSSHFWSWIRQPPGKGLEWIGYILYTGGTSFNPSLKSRVSMSVGTSKNQFSLKLSSVTAADTAVYYCARARSGITFTGIIVPGSFDIWGQGTMVTVSS

SEQ ID NO: 409 - protein, 119 aa, Artificial Sequence
  Synthetic Construct
QVQLVESGGGVVQPGKSLRLSCVASGFTFSSDAMYWVRQAPGKGLEWVAVIYYDGNYQYYEDSVKGRFTISRDNSQNTLDLQMNSLRVDDTAVYFCARLNWDYWYLDLWGRGTLVTVSS

SEQ ID NO: 410 - protein, 123 aa, Artificial Sequence
  Synthetic Construct
EVQLVESGGGLVQPGRSLRLSCAASGFTFDDYTMHWVRQAPGKGLEWVSGISWNSGSIGYADSVKGRFTISRDNAKKSLYLQMNSLRAEDTALYYCAKDNSGYGHYYYGMDVWGQGTTVTVAS

SEQ ID NO: 411 - protein, 127 aa, Artificial Sequence
  Synthetic Construct
EVQLVESGGGLVQPGRSLRLSCVASGFTFNDYAMHWVRQAPGKGLEWVSVISWNSDSIGYADSVKGRFTISRDNAKNSLYLQMHSLRAEDTALYYCAKDNHYGSGSYYYYQYGMDVWGQGTTVTVSS

SEQ ID NO: 412 - protein, 119 aa, Artificial Sequence
  Synthetic Construct
EVQLVESGGGLVKPGGSLRLSCAASGFTFRNYNINWVRQAPGKGLEWVSLISGSSSYIYYADSVKGRFTVSRDNAKNSLYLQMNSLRAEDTAVYYCARRTLSYYVMDVWGQGTTVTVSS

SEQ ID NO: 413 - protein, 120 aa, Artificial Sequence
  Synthetic Construct
QVQLQESGPGLVKPSETLSLTCTVSGDSVSSSYWTWIRQPPGKGLEWIGYIYYSGSSNYNPSLKSRATISVDTSKNQFSLKLSSVTAADTAVYYCAREGNVDTTMIFDYWGQGTLVTVSS

SEQ ID NO: 414 - protein, 130 aa, Artificial Sequence [sequence omitted]

SEQ ID NO: 415 - protein, 115 aa, Artificial Sequence [sequence omitted]

SEQ ID NO: 416 - protein, 123 aa, Artificial Sequence [sequence omitted]

SEQ ID NO: 417 - protein, 123 aa, Artificial Sequence
  Synthetic Construct
QVQLVQSGAEVMKPGSSVKVSCKASGYTFSWYWLEWVRQAPGHGLEWMGEIDPGTFTTNYNEKFKARVTFTADTSTSTAYMELSSLRSEDTAVYYCARFSHFSGSNYDYFDYWGQGTLVTVSS

SEQ ID NO: 418 - protein, 121 aa, Artificial Sequence
  Synthetic Construct
EVQLVESGGGLVQPGGSLRLSCAVSGYSITSGYSWNWIRQAPGKGLEWVASITYDGSTNYADSVKGRFTISRDDSKNTFYLQMNSLRAEDTAVYYCARGSHYFGHWHFAVWGQGTLVTVSS

SEQ ID NO: 419 - protein, 120 aa, Artificial Sequence
  Synthetic Construct
QVQLVESGGGVVQPGRSLRLSCAASGFTFSSYGMHWVRQAPGKGLEWVAVISYEESNRYHADSVKGRFTISRDNSKITLYLQMNSLRTEDTAVYYCARDGGIAAPGPDYWGQGTLVTVSS

SEQ ID NO: 420 - protein, 107 aa, Artificial Sequence [sequence omitted]

SEQ ID NO: 421 - protein, 106 aa, Artificial Sequence [sequence omitted]

SEQ ID NO: 422 - protein, 107 aa, Artificial Sequence [sequence omitted]

SEQ ID NO: 423 - protein, 107 aa, Artificial Sequence
  Synthetic Construct
DIQMTQSPSSLSASVGDRVTITCRASQGISSWLAWYQQKPEKAPKSLIYAASSLQSGVPSRFSGSGSGTDFTLTISSLQPEDFATYYCQQYNIYPYTFGQGTKLEIK

SEQ ID NO: 424 - protein, 108 aa, Artificial Sequence [sequence omitted]

SEQ ID NO: 425 - protein, 112 aa, Artificial Sequence
  Synthetic Construct
DIVMTQTPLSLSVTPGQPASISCRSSRSLVHSRGNTYLHWYLQKPGQSPQLLIYKVSNRFIGVPDRFSGSGSGTDFTLKISRVEAEDVGVYYCSQSTHLPFTFGQGTKLEIK

SEQ ID NO: 426 - protein, 107 aa, Artificial Sequence
  Synthetic Construct
EIVMTQSPATLSVSPGERATLSCRASQSVSSNLAWFQQKPGQAPRPLIYDASTRATGVPARFSGSGSGTDFTLTISSLQSEDFAVYYCQQYDNWPLTFGGGTKVEIK

SEQ ID NO: 427 - protein, 111 aa, Artificial Sequence
  Synthetic Construct
QSVLTQPPSVSGAPGQRVTISCTGSSSNIGSGYDVHWYQQLPGTAPKLLIYGNSKRPSGVPDRFSGSKSGTSASLAITGLQSEDEADYYCASWTDGLSLVVFGGGTKLTVL

SEQ ID NO: 428 - protein, 107 aa, Artificial Sequence
  Synthetic Construct
DIQMTQSPSSLSASVGDRVTITCKASRDVAIAVAWYQQKPGKVPKLLIYWASTRHTGVPSRFSGSGSRTDFTLTISSLQPEDVADYFCHQYSSYPFTFGSGTKLEIK

SEQ ID NO: 429 - protein, 107 aa, Artificial Sequence [sequence omitted]

SEQ ID NO: 430 - protein, 107 aa, Artificial Sequence
  Synthetic Construct
DILLTQSPAILSVSPGERVSFSCRASQFVGSSIHWYQQRTNGSPRLLIKYASESMSGIPSRFSGSGSGTDFTLSINTVESEDIADYYCQQSHSWPFTFGSGTNLEVK

SEQ ID NO: 431 - protein, 111 aa, Artificial Sequence
  Synthetic Construct
QSVLTQPPSVSGAPGQRVTISCTGSGSNIGAPYDVSWYQQLPGTAPKLLIYHNNKRPSGVPDRFSGSKSGTSASLAITGLQAEDEADYYCATVEAGLSGSVFGGGTKLTVL

SEQ ID NO: 432 - protein, 107 aa, Artificial Sequence
  Synthetic Construct
DIQMTQSPSSLSASVGDRVTITCRASQDISSYLNWYQQKPGKAPKLLTYYTSRLHSGVPSRFSGSGSGTDFTFTISSLQPEDIATYYCQQGNTLPYTFGQGTKVEIK

SEQ ID NO: 433 - protein, 107 aa, Artificial Sequence
  Synthetic Construct
DIQMTQSPSSVSASVGDRVTITCRASQGISSWLAWYQQKPGKAPKLLIYGASSLESGVPSRFSGSGSGTDFTLTISSLQPEDFASYYCQQANSFPYTFGQGTKLEIK

SEQ ID NO: 434 - protein, 108 aa, Artificial Sequence
  Synthetic Construct
EIVLTQSPATLSLSPGERATLSCRASQSVYSYLAWYQQKPGQAPRLLIYDASNRATGIPARFSGSGSGTDFTLTISSLEPEDFAVYYCQQRSNWPPFTFGPGTKVDIK

SEQ ID NO: 435 - protein, 107 aa, Artificial Sequence
  Synthetic Construct
DIQMTQSPSSLSASVGDRVTITCKASQNVGTNVAWYQQKPGKAPKALIYSASFLYSGVPYRFSGSGSGTDFTLTISSLQPEDFATYYCQQYNIYPLTFGQGTKVEIK

SEQ ID NO: 436 - protein, 107 aa, Artificial Sequence
  Synthetic Construct
DIQLTQSPSFLSASVGDRVTITCKASQNVDTNVAWYQQKPGKAPKALIYSASYRYSGVPSRFSGSGSGTDFTLTISSLQPEDFATYYCQQYNNYPFTFGQGTKLEIK

SEQ ID NO: 437 - protein, 108 aa, Artificial Sequence
  Synthetic Construct
EIVLTQSPGTLSLSPGERATLSCRASQSVGSSYLAWYQQKPGQAPRLLIYGAFSRATGIPDRFSGSGSGTDFTLTISRLEPEDFAVYYCQQYGSSPWTFGQGTKVEIK

SEQ ID NO: 438 - protein, 108 aa, Artificial Sequence
  Synthetic Construct
DIQMTQSPSSLSASVGDRVTITCRASQNVGTAVAWLQQTPGKAPKLLIYSASNRYTGVPSRFSGSGSGTDYTFTISSLQPEDIATYYCQQYTNYPMYTFGQGTKVQIK

SEQ ID NO: 439 - protein, 107 aa, Artificial Sequence [sequence omitted]

SEQ ID NO: 440 - protein, 108 aa, Artificial Sequence
  Synthetic Construct
EIVLTQSPGTLSLSPGERATLSCRASQRVSSSYLAWYQQKPGQAPRLLIYDASSRATGIPDRFSGSGSGTDFTLTISRLEPEDFAVYYCQQYGSLPWTFGQGTKVEIK

SEQ ID NO: 441 - protein, 107 aa, Artificial Sequence [sequence omitted]

SEQ ID NO: 442 - protein, 111 aa, Artificial Sequence [sequence omitted]

SEQ ID NO: 443 - protein, 107 aa, Artificial Sequence [sequence omitted]

SEQ ID NO: 444 - protein, 106 aa, Artificial Sequence [sequence omitted]

SEQ ID NO: 445 - protein, 107 aa, Artificial Sequence
  Synthetic Construct
EIVLTQSPATLSLSPGERATLSCRASQSVSSYLAWYQQKPGQAPRLLIYDASNRATGIPARFSGSGSGTDFTLTISSLEPEDFAVYYCQQRSNWPITFGQGTRLEIK

SEQ ID NO: 446 - protein, 106 aa, Artificial Sequence
  Synthetic Construct
QIVLSQSPAILSASPGEKVTMTCRASSSVSYMHWYQQKPGSSPKPWIYATSNLASGVPARFSGSGSGTSYSFTISRVEAEDAATYYCQQWTFNPPTFGGGTRLEIK

SEQ ID NO: 447 - protein, 107 aa, Artificial Sequence
  Synthetic Construct
DIQMTQSPSSLSASVGDRVTITCKASQNIDKYLNWYQQKPGKAPKLLIYNTNNLQTGVPSRFSGSGSGTDFTFTISSLQPEDIATYYCLQHISRPRTFGQGTKVEIK

SEQ ID NO: 448 - protein, 108 aa, Artificial Sequence
  Synthetic Construct
DIQMTQSPATLSLSPGERATLSCRASQSVSSYLAWYQQKPGQAPRLLIYDASNRATGIPARFSGSGSGTDFTLTISSLEPEDFAVYYCQQRSNWPMYTFGQGTKLEIK

SEQ ID NO: 449 - protein, 106 aa, Artificial Sequence [sequence omitted]

SEQ ID NO: 450 - protein, 107 aa, Artificial Sequence [sequence omitted]

SEQ ID NO: 451 - protein, 107 aa, Artificial Sequence
  Synthetic Construct
DIQMTQSPSSLSASVGDSVTITCQASTDISSHLNWYQQKPGKAPELLIYYGSHLLSGVPSRFSGSGSGTDFTFTISSLEAEDAATYYCGQGNRLPYTFGQGTKVEIE

SEQ ID NO: 452 - protein, 108 aa, Artificial Sequence [sequence omitted]

SEQ ID NO: 453 - protein, 108 aa, Artificial Sequence
  Synthetic Construct
SSELTQDPAVSVALGQTVRVTCQGDSLRSYYASWYQQKPGQAPVLVIYGKNNRPSGIPDRFSGSSSGNTASLTITGAQAEDEADYYCSSRDSSGNHWVFGGGTELTVL

SEQ ID NO: 454 - protein, 104 aa, Artificial Sequence [sequence omitted]

SEQ ID NO: 455 - protein, 106 aa, Artificial Sequence
  Synthetic Construct
DIQMTQSPSTLSASVGDRVTITCSASSSISYMHWYQQKPGKAPKLLIYTTSNLASGVPARFSGSGSGTEFTLTISSLQPDDFATYYCHQRSTYPLTFGQGTKVEVK

SEQ ID NO: 456 - protein, 112 aa, Artificial Sequence [sequence omitted]

SEQ ID NO: 457 - protein, 113 aa, Artificial Sequence [sequence omitted]

SEQ ID NO: 458 - protein, 107 aa, Artificial Sequence [sequence omitted]

SEQ ID NO: 459 - protein, 107 aa, Artificial Sequence [sequence omitted]

SEQ ID NO: 460 - protein, 107 aa, Artificial Sequence
  Synthetic Construct
DIQMTQSPASLSASVGETVTITCRASENIFSYLAWYQQKQGKSPQLLVYNTKTLAEGVPSRFSGSGSGTQFSLKINSLQPEDFGSYYCQHHYGTPFTFGSGTKLEIK

SEQ ID NO: 461 - protein, 108 aa, Artificial Sequence
  Synthetic Construct
ETVLTQSPGTLSLSPGERATLSCRASQSLGSSYLAWYQQKPGQAPRLLIYGASSRAPGIPDRFSGSGSGTDFTLTISRLEPEDFAVYYCQQYADSPITFGQGTRLEIK

SEQ ID NO: 462 - protein, 111 aa, Artificial Sequence
  Synthetic Construct
DIVLTQSPASLAVSLGQRATISCRASESVDSYGQSYMHWYQQKAGQPPKLLIYLASNLESGVPARFSGSGSRTDFTLTIDPVQAEDAATYYCQQNAEDSRTFGGGTKLEIK

SEQ ID NO: 463 - protein, 107 aa, Artificial Sequence
  Synthetic Construct
DIQMTQSPASLSVSVGDTITLTCHASQNIDVWLSWFQQKPGNIPKLLIYKASNLHTGVPSRFSGSGSGTGFTLTISSLQPEDIATYYCQQAHSYPFTFGGGTKLEIK

SEQ ID NO: 464 - protein, 106 aa, Artificial Sequence
  Synthetic Construct
EIVLTQSPATMSASPGERVTITCSAHSSVSFMHWFQQKPGTSPKLWIYSTSSLASGVPARFGGSGSGTSYSLTISSMEAEDAATYYCQQRSSFPLTFGAGTKLELK

SEQ ID NO: 465 - protein, 107 aa, Artificial Sequence
  Synthetic Construct
EIVLTQSPATLSLSPGERTTLSCRASQRISTYLAWYQQKPGQAPRLLIYDASKRATGIPARFSGSGSGTGFTLTISSLEPEDFAVYYCQQRSNWPLTFGGGTKVEIK

SEQ ID NO: 466 - protein, 108 aa, Artificial Sequence
  Synthetic Construct
DIQMTQSPSSLSASLGDRVTITCRASQSINSYLNWYQQKPGKAPKLLIYVASSLQSGVPSRFSGSGSGTEFTLTISNLQPEDFATYYCQQSYSTPPITFGQGTRLEIK

SEQ ID NO: 467 - protein, 109 aa, Artificial Sequence
  Synthetic Construct
QIVLTQSPAIMSASLGERVTMTCTASSSVSSSYLHWYQQKPGSSPKLWIYSTSNLASGVPARFSGSGSGTFYSLTISSMEAEDDATYYCHQYYRLPPITFGAGTKLELK

SEQ ID NO: 468 - protein, 107 aa, Artificial Sequence
  Synthetic Construct
DIQMTQSPSSVSASVGDRVTITCRASQGIFSWLAWYQQKPGKAPKLLIYAASSLQSGVPSRFSGSGSGTDFTLTISSLQPEDFAIYYCQQANSVPITFGQGTRLEIK

SEQ ID NO: 469 - protein, 106 aa, Artificial Sequence
  Synthetic Construct
DIQMTQSPSSLSASVGDRVTITCKASQDIDRYMAWYQDKPGKAPRLLIHDTSTLQSGVPSRFSGSGSGRDYTLTISNLEPEDFATYYCLQYDNLWTFGGGTKVEIK

SEQ ID NO: 470 - protein, 107 aa, Artificial Sequence
  Synthetic Construct
DIQMTQSPSTLSASVGDRVTITCRASQSIRSWLAWYQQKPGKAPKLLIYKASSLESGVPSRFSGSGSGTEFTLTISSLQPDDFATYYCQQYNSYSYTFGQGTKLEIK

SEQ ID NO: 471 - protein, 107 aa, Artificial Sequence [sequence omitted]

SEQ ID NO: 472 - protein, 108 aa, Artificial Sequence
  Synthetic Construct
EIVLTQSPGTLSLSPGERATLSCRASQSVSSSYLAWYQQKPGQAPRLLIYGASSRATGIPDRFSGSGSGTDFTLTISRLEPEDFAVYYCQQYGSSPWTFGQGTKVEIK

SEQ ID NO: 473 - protein, 108 aa, Artificial Sequence
  Synthetic Construct
DIQMTQSPSSLSASVGDRVTITCRASQSISSYLNWYQQKPGKAPKLLIYAASSLQSGVPSRFSGSGSGTDFTLTISSLQPEDFATYYCQQSYSTPPITFGQGTRLEIK

SEQ ID NO: 474 - protein, 108 aa, Artificial Sequence
  Synthetic Construct
AEIVMTQSPATLSVSPGERATLSCRASQSVSSNLAWYQQKPGQAPRLLIYGASTRATGIPARFSGSGSGTEFTLTISSLQSEDFAVYYCQHYINWPLTFGGGTKVEIK

SEQ ID NO: 475 - protein, 107 aa, Artificial Sequence
  Synthetic Construct
DIQVTQSPSPLSASVGDRVTITCRASQGISNYLAWYQQKPGRVPQLLIYAASTLQSGVPSRFSGSGSGTDFTLTISSLQPEDVATYYCQKYNSAPYTFGQGTKLEIK

SEQ ID NO: 476 - protein, 107 aa, Artificial Sequence
  Synthetic Construct
AIQMTQSPSSLSASVGDRVTITCRASQGIRNDLGWYQQKPGKAPKLLIYAASSLQSGVPSRFAGRGSGTDFTLTISSLQPEDFATYYCLQDFNYPWTFGQGTKVEIK

SEQ ID NO: 477 - protein, 110 aa, Artificial Sequence
  Synthetic Construct
QSVLTQPPSVSAAPGQKVTISCSGSSSNIGNNYVSWYQQLPGTAPKLLIYDNNKRPSGIPDRFSGSKSGTSTTLGITGLQTGDEADYYCGTWDSRLSAVVFGGGTKLTVL

SEQ ID NO: 478 - protein, 111 aa, Artificial Sequence [sequence omitted]

SEQ ID NO: 479 - protein, 107 aa, Artificial Sequence [sequence omitted]

SEQ ID NO: 480 - protein, 107 aa, Artificial Sequence
  Synthetic Construct
EIVMTQSPATLSVSPGERATLSCRASQSIGTNIHWYQQKPGQAPRLLIYYASESISGIPARFSGSGSGTEFTLTISSLQSEDFAVYYCQQSWSWPTTFGGGTKVEIK

SEQ ID NO: 481 - protein, 111 aa, Artificial Sequence [sequence omitted]

SEQ ID NO: 482 - protein, 112 aa, Artificial Sequence
  Synthetic Construct
DIVMTQSPLSLTVTPGEPASISCRSSQSLLYSNGYNYLDWYLQKPGQSPQVLISLGSNRASGVPDRFSGSGSGTDFTLKISRVEAEDVGVYYCMQARQTPFTFGPGTKVDIR

SEQ ID NO: 483 - protein, 16 aa, Artificial Sequence
  Synthetic Construct
MPLLLLLPLLWAGALA

SEQ ID NO: 484 - protein, 20 aa, Artificial Sequence
  Synthetic Construct
MYRMQLLSCIALSLALVTNS

SEQ ID NO: 485 - protein, 22 aa, Artificial Sequence
  Synthetic Construct
MDAMKRGLCCVLLLCGAVFVSP

SEQ ID NO: 486 - protein, 21 aa, Artificial Sequence
  Synthetic Construct
MWWRLWWLLLLLLLLWPMVWA

SEQ ID NO: 487 - protein, 19 aa, Artificial Sequence
  Synthetic Construct
MDWTWRILFLVAAATGAHS

SEQ ID NO: 488 - protein, 19 aa, Artificial Sequence
  Synthetic Construct
MDWTWRVFCLLAVAPGAHS

SEQ ID NO: 489 - protein, 19 aa, Artificial Sequence
  Synthetic Construct
MEFGLSWVFLVAIIKGVQC

SEQ ID NO: 490 - protein, 19 aa, Artificial Sequence
  Synthetic Construct
MEFGLSWVFLVALLRGVQC

SEQ ID NO: 491 - protein, 19 aa, Artificial Sequence
  Synthetic Construct
MEFGLSWVFLVAILKGVQC

SEQ ID NO: 492 - protein, 20 aa, Artificial Sequence
  Synthetic Construct
MSVSFLIFLPVLGLPWGVLS

SEQ ID NO: 493 - protein, 19 aa, Artificial Sequence
  Synthetic Construct
MDWTWSILFLVAAPTGAHS

SEQ ID NO: 494 - protein, 19 aa, Artificial Sequence
  Synthetic Construct
MEFWLSWVFLVAILKGVQC

SEQ ID NO: 495 - protein, 19 aa, Artificial Sequence
  Synthetic Construct
MDWTWRILFLVAAATSAHS

SEQ ID NO: 496 - protein, 19 aa, Artificial Sequence
  Synthetic Construct
MDWIWRILFLVGAATGAHS

SEQ ID NO: 497 - protein, 19 aa, Artificial Sequence
  Synthetic Construct
MELGLSWVFLVAILEGVQC

SEQ ID NO: 498 - protein, 19 aa, Artificial Sequence
  Synthetic Construct
MELGLCWVFLVAILEGVQC

SEQ ID NO: 499 - protein, 19 aa, Artificial Sequence
  Synthetic Construct
MKHLWFFLLLVAAPRWVLP

SEQ ID NO: 500 - protein, 20 aa, Artificial Sequence
  Synthetic Construct
MKHLWFLLLWCQLPDVGVLS

SEQ ID NO: 501 - protein, 19 aa, Artificial Sequence
  Synthetic Construct
MDCTWRILFLVAAATGTHA

SEQ ID NO: 502 - protein, 19 aa, Artificial Sequence
  Synthetic Construct
MDTLCYTLLLLTTPSWVLS

SEQ ID NO: 503 - protein, 19 aa, Artificial Sequence
  Synthetic Construct
MELGLRWVFLVAILEGVQC

SEQ ID NO: 504 - protein, 20 aa, Artificial Sequence
  Synthetic Construct
MTEFGLSWVFLVAIFKGVQC

SEQ ID NO: 505 - protein, 19 aa, Artificial Sequence
  Synthetic Construct
MGSTAILALLLAVLQGVCS

SEQ ID NO: 506 - protein, 19 aa, Artificial Sequence
  Synthetic Construct
MDTLCSTLLLLTIPSWVLS

SEQ ID NO: 507 - protein, 19 aa, Artificial Sequence
  Synthetic Construct
MEFGLSWIFLAAILKGVQC

SEQ ID NO: 508 - protein, 19 aa, Artificial Sequence
  Synthetic Construct
MDWTWRILFLVAAATDAYS

SEQ ID NO: 509 - protein, 19 aa, Artificial Sequence
  Synthetic Construct
MELGLSWIFLLAILKGVQC

SEQ ID NO: 510 - protein, 19 aa, Artificial Sequence
  Synthetic Construct
MEFGLSWLFLVAILKGVQC

SEQ ID NO: 511 - protein, 19 aa, Artificial Sequence
  Synthetic Construct
MEFGLSWVFLVVILQGVQC

SEQ ID NO: 512 - protein, 19 aa, Artificial Sequence
  Synthetic Construct
MGSTAILGLLLAVLQGVCA

SEQ ID NO: 513 - protein, 19 aa, Artificial Sequence
  Synthetic Construct
MKHLWFFLLLVAAPRWVLS

SEQ ID NO: 514 - protein, 22 aa, Artificial Sequence
  Synthetic Construct
MDMRVPAQLLGLLLLWLRGARC

SEQ ID NO: 515 - protein, 22 aa, Artificial Sequence
  Synthetic Construct
MDMRVPAQLLGLLQLWLSGARC

SEQ ID NO: 516 - protein, 22 aa, Artificial Sequence
  Synthetic Construct
MDMRVPAQLLGLLLLWLSGARC

SEQ ID NO: 517 - protein, 22 aa, Artificial Sequence
  Synthetic Construct
MDMRVPAQLLGLLLLWLPDTRC

SEQ ID NO: 518 - protein, 22 aa, Artificial Sequence
  Synthetic Construct
MDMRVPAQLLGLLLLWFPGARC

SEQ ID NO: 519 - protein, 22 aa, Artificial Sequence
  Synthetic Construct
MDMRVLAQLLGLLLLCFPGARC

SEQ ID NO: 520 - protein, 22 aa, Artificial Sequence
  Synthetic Construct
MDMRVPAQLLGLLLLWFPGSRC

SEQ ID NO: 521 - protein, 22 aa, Artificial Sequence
  Synthetic Construct
MDMRVPAQRLGLLLLWFPGARC

SEQ ID NO: 522 - protein, 20 aa, Artificial Sequence
  Synthetic Construct
MRVPAQLLGLLLLWLPGARC

SEQ ID NO: 523 - protein, 22 aa, Artificial Sequence
  Synthetic Construct
MDMRVPAQLLGLLLLWLPGARC

SEQ ID NO: 524 - protein, 22 aa, Artificial Sequence
  Synthetic Construct
MDMRVPAQLLGLLLLWLPGAKC

SEQ ID NO: 525 - protein, 20 aa, Artificial Sequence
  Synthetic Construct
MRLPAQLLGLLMLWVPGSSE

SEQ ID NO: 526 - protein, 20 aa, Artificial Sequence
  Synthetic Construct
MVSPLQFLRLLLLWVPASRG

SEQ ID NO: 527 - protein, 20 aa, Artificial Sequence
  Synthetic Construct
MRLPAQLLGLLMLWVPGSSE

SEQ ID NO: 528 - protein, 20 aa, Artificial Sequence
  Synthetic Construct
MRLPAQLLGLLMLWVPGSSG

SEQ ID NO: 529 - protein, 20 aa, Artificial Sequence
  Synthetic Construct
MRLPAQLLGLLMLWIPGSSA

SEQ ID NO: 530 - protein, 20 aa, Artificial Sequence
  Synthetic Construct
MRLPAQLLGLLMLWVSGSSG

SEQ ID NO: 531 - protein, 20 aa, Artificial Sequence
  Synthetic Construct
MRLLAQLLGLLMLWVPGSSG

SEQ ID NO: 532 - protein, 20 aa, Artificial Sequence
  Synthetic Construct
METPAQLLFLLLLWLPDTTG

SEQ ID NO: 533 - protein, 20 aa, Artificial Sequence
  Synthetic Construct
MEAPAQLLFLLLLWLPDTTG

SEQ ID NO: 534 - protein, 20 aa, Artificial Sequence
  Synthetic Construct
MEAPAQLLFLLLLWLTDTTG

SEQ ID NO: 535 - protein, 23 aa, Artificial Sequence
  Synthetic Construct
MEPWKPQHSFFFLLLLWLPDTTG

SEQ ID NO: 536 - protein, 20 aa, Artificial Sequence
  Synthetic Construct
MVLQTQVFISLLLWISGAYG

SEQ ID NO: 537 - protein, 20 aa, Artificial Sequence
  Synthetic Construct
MGSQVHLLSFLLLWISDTRA

SEQ ID NO: 538 - protein, 19 aa, Artificial Sequence
  Synthetic Construct
MLPSQLIGFLLLWVPASRG

SEQ ID NO: 539 - protein, 19 aa, Artificial Sequence
  Synthetic Construct
MAWSPLFLTLITHCAGSWA

SEQ ID NO: 540 - protein, 19 aa, Artificial Sequence
  Synthetic Construct
MAWSPLLLTLLAHCTGSWA

SEQ ID NO: 541 - protein, 19 aa, Artificial Sequence
  Synthetic Construct
MASFPLLLTLLTHCAGSWA

SEQ ID NO: 542 - protein, 19 aa, Artificial Sequence
  Synthetic Construct
MAGFPLLLTLLTHCAGSWA

SEQ ID NO: 543 - protein, 19 aa, Artificial Sequence
  Synthetic Construct
MTCSPLLLTLLIHCTGSWA

SEQ ID NO: 544 - protein, 19 aa, Artificial Sequence
  Synthetic Construct
MAWALLLLSLLTQGTGSWA

SEQ ID NO: 545 - protein, 19 aa, Artificial Sequence
  Synthetic Construct
MAWALLLLTLLTQGTGSWA

SEQ ID NO: 546 - protein, 19 aa, Artificial Sequence
  Synthetic Construct
MAWALLLLTLLTQDTGSWA

SEQ ID NO: 547 - protein, 19 aa, Artificial Sequence
  Synthetic Construct
MAWIPLFLGVLAYCTGSVA

SEQ ID NO: 548 - protein, 19 aa, Artificial Sequence
  Synthetic Construct
MAWTALLLSLLAHFTGSVA

SEQ ID NO: 549 - protein, 19 aa, Artificial Sequence
  Synthetic Construct
MAWTPLLLPLLTFCTVSEA

SEQ ID NO: 550 - protein, 19 aa, Artificial Sequence
  Synthetic Construct
MAWTPLWLTLLTLCIGSVV

SEQ ID NO: 551 - protein, 19 aa, Artificial Sequence
  Synthetic Construct
MAWTVLLLGLLSHCTGSVT

SEQ ID NO: 552 - protein, 19 aa, Artificial Sequence
  Synthetic Construct
MAWATLLLPLLNLYTGSIA

SEQ ID NO: 553 - protein, 19 aa, Artificial Sequence
  Synthetic Construct
MAWIPLLLPLLTLCTGSEA

SEQ ID NO: 554 - protein, 19 aa, Artificial Sequence
  Synthetic Construct
MAWIPLLLPLLILCTVSVA

SEQ ID NO: 555 - protein, 19 aa, Artificial Sequence
  Synthetic Construct
MAWVSFYLLPFIFSTGLCA

SEQ ID NO: 556 - protein, 21 aa, Artificial Sequence
  Synthetic Construct
MAWTQLLLLFPLLLHWTGSLS

SEQ ID NO: 557 - protein, 20 aa, Artificial Sequence
  Synthetic Construct
MAWTPLLFLTLLLHCTGSLS

SEQ ID NO: 558 - protein, 19 aa, Artificial Sequence
  Synthetic Construct
MAWTPLLLLLLSHCTGSLS

SEQ ID NO: 559 - protein, 19 aa, Artificial Sequence
  Synthetic Construct
MAWTPLLLLFLSHCTGSLS

SEQ ID NO: 560 - protein, 19 aa, Artificial Sequence
  Synthetic Construct
MAWTLLLLVLLSHCTGSLS

SEQ ID NO: 561 - protein, 19 aa, Artificial Sequence
  Synthetic Construct
MAWAPLLLTLLAHCTGSWA

SEQ ID NO: 562 - protein, 19 aa, Artificial Sequence
  Synthetic Construct
MAWTPLFLFLLTCCPGSNS

SEQ ID NO: 563 - protein, 19 aa, Artificial Sequence
  Synthetic Construct
MAWMMLLLGLLAYGSGVDS

SEQ ID NO: 564 - protein, 19 aa, Artificial Sequence
  Synthetic Construct
MAWAPLLLTLLSLLTGSLS

SEQ ID NO: 565 - protein, 19 aa, Artificial Sequence
  Synthetic Construct
MPWALLLLTLLTHSAVSVV

SEQ ID NO: 566 - protein, 15 aa, Artificial Sequence
  Synthetic Construct
GGGGSGGGGSGGGGS

SEQ ID NO: 567 - protein, 18 aa, Artificial Sequence
  Synthetic Construct
GGSSRSSSSGGGGSGGGG

SEQ ID NO: 568 - protein, 20 aa, Artificial Sequence
  Synthetic Construct
GGGGSGGGGSGGGGSGGGGS

SEQ ID NO: 569 - protein, 15 aa, Artificial Sequence
  Synthetic Construct
CGGGSGGGGSGGGGS

SEQ ID NO: 570 - protein, 15 aa, Artificial Sequence
  Synthetic Construct
SHGGHGGGGSGGGGS

SEQ ID NO: 571 - protein, 15 aa, Artificial Sequence
  Synthetic Construct
MGGMSGGGGSGGGGS

SEQ ID NO: 572 - protein, 15 aa, Artificial Sequence
  Synthetic Construct
YGGYSGGGGSGGGGS

SEQ ID NO: 573 - protein, 15 aa, Artificial Sequence
  Synthetic Construct
WGGYSGGGGSGGGGS

SEQ ID NO: 574 - protein, 12 aa, Artificial Sequence
  Synthetic Construct
SVSVGMKPSPRP

SEQ ID NO: 575 - protein, 12 aa, Artificial Sequence
  Synthetic Construct
VISNHAGSSRRL

SEQ ID NO: 576 - protein, 12 aa, Artificial Sequence
  Synthetic Construct
PWIPTPRPTFTG

SEQ ID NO: 577 - protein, 11 aa, Artificial Sequence
  Synthetic Construct
RGRGRGRGRGR

SEQ ID NO: 578 - DNA, 1497 bp, Artificial Sequence
  Synthetic Construct
atggagttcggcctgagctggctgttcctggtggccatcctgaagggcgtgcagtgcgaggtgcagctggtggagagcggcggcggcctggtgcagcccggcaggagcctgaggctgagctgcgccgccagcggcttcaccttcgacgactacgccatgcactgggtgaggcaggcccccggcaagggcctggagtgggtgagcgccatcacctggaacagcggccacatcgactacgccgacagcgtggagggcaggttcaccatcagcagggacaacgccaagaacagcctgtacctgcagatgaacagcctgagggccgaggacaccgccgtgtactactgcgccaaggtgagctacctgagcaccgccagcagcctggactactggggccagggcaccctggtgaccgtgagcagcggcggcggcggcagcggcggcggcggcagcggcggcggcggcagcggcggcggcggcagcgacatccagatgacccagagccccagcagcctgagcgccagcgtgggcgacagggtgaccatcacctgcagggccagccagggcatcaggaactacctggcctggtaccagcagaagcccggcaaggcccccaagctgctgatctacgccgccagcaccctgcagagcggcgtgcccagcaggttcagcggcagcggcagcggcaccgacttcaccctgaccatcagcagcctgcagcccgaggacgtggccacctactactgccagaggtacaacagggccccctacaccttcggccagggcaccaaggtggagatcaaggagcccaagagctgcgacaagacccacacctgccccccctgccccgcccccgagctgctgggcggccccagcgtgttcctgttcccccccaagcccaaggacaccctgatgatcagcaggacccccgaggtgacctgcgtggtggtggacgtgagccacgaggaccccgaggtgaagttcaactggtacgtggacggcgtggaggtgcacaacgccaagaccaagcccagggaggagcagtacaacagcacctacagggtggtgagcgtgctgaccgtgctgcaccaggactggctgaacggcaaggagtacaagtgcaaggtgagcaacaaggccctgcccgcccccatcgagaagaccatcagcaaggccaagggccagcccagggagccccaggtgtacaccctgccccccagcagggaggagatgaccaagaaccaggtgagcctgacctgcctggtgaagggcttctaccccagcgacatcgccgtggagtgggagagcaacggccagcccgagaacaactacaagaccaccccccccgtgctggacagcgacggcagcttcttcctgtacagcaagctgaccgtggacaagagcaggtggcagcagggcaacgtgttcagctgcagcgtgatgcacgaggccctgcacaaccactacacccagaagagcctgagcctgagccccggcaag

SEQ ID NO: 579 - DNA, 1506 bp, Artificial Sequence
  Synthetic Construct
atggacatgagggtgcccgcccagctgctgggcctgctgctgctgtggctgaggggcgccaggtgcgacatccagatgacccagagccccagcagcctgagcgccagcgtgggcgacagggtgaccatcacctgcagggccagccagggcatcaggaactacctggcctggtaccagcagaagcccggcaaggcccccaagctgctgatctacgccgccagcaccctgcagagcggcgtgcccagcaggttcagcggcagcggcagcggcaccgacttcaccctgaccatcagcagcctgcagcccgaggacgtggccacctactactgccagaggtacaacagggccccctacaccttcggccagggcaccaaggtggagatcaagggcggcggcggcagcggcggcggcggcagcggcggcggcggcagcggcggcggcggcagcgaggtgcagctggtggagagcggcggcggcctggtgcagcccggcaggagcctgaggctgagctgcgccgccagcggcttcaccttcgacgactacgccatgcactgggtgaggcaggcccccggcaagggcctggagtgggtgagcgccatcacctggaacagcggccacatcgactacgccgacagcgtggagggcaggttcaccatcagcagggacaacgccaagaacagcctgtacctgcagatgaacagcctgagggccgaggacaccgccgtgtactactgcgccaaggtgagctacctgagcaccgccagcagcctggactactggggccagggcaccctggtgaccgtgagcagcgagcccaagagctgcgacaagacccacacctgccccccctgccccgcccccgagctgctgggcggccccagcgtgttcctgttcccccccaagcccaaggacaccctgatgatcagcaggacccccgaggtgacctgcgtggtggtggacgtgagccacgaggaccccgaggtgaagttcaactggtacgtggacggcgtggaggtgcacaacgccaagaccaagcccagggaggagcagtacaacagcacctacagggtggtgagcgtgctgaccgtgctgcaccaggactggctgaacggcaaggagtacaagtgcaaggtgagcaacaaggccctgcccgcccccatcgagaagaccatcagcaaggccaagggccagcccagggagccccaggtgtacaccctgccccccagcagggaggagatgaccaagaaccaggtgagcctgacctgcctggtgaagggcttctaccccagcgacatcgccgtggagtgggagagcaacggccagcccgagaacaactacaagaccaccccccccgtgctggacagcgacggcagcttcttcctgtacagcaagctgaccgtggacaagagcaggtggcagcagggcaacgtgttcagctgcagcgtgatgcacgaggccctgcacaaccactacacccagaagagcctgagcctgagccccggcaag

SEQ ID NO: 580 - DNA, 1497 bp, Artificial Sequence
  Synthetic Construct
atgaagcacctgtggttcctgctgctgtggtgccagctgcccgacgtgggcgtgctgagccaggtgcagctgcagcagcccggcgccgagctggtgaagcccggcgccagcgtgaagatgagctgcaaggccagcggctacaccttcaccagctacaacatgcactgggtgaagcagacccccggcaggggcctggagtggatcggcgccatctaccccggcaacggcgacaccagctacaaccagaagttcaagggcaaggccaccctgaccgccgacaagagcagcagcaccgcctacatgcagctgagcagcctgaccagcgaggacagcgccgtgtactactgcgccaggagcacctactacggcggcgactggtacttcaacgtgtggggcgccggcaccaccgtgaccgtgagcgccggcggcggcggcagcggcggcggcggcagcggcggcggcggcagcggcggcggcggcagccagatcgtgctgagccagagccccgccatcctgagcgccagccccggcgagaaggtgaccatgacctgcagggccagcagcagcgtgagctacatccactggttccagcagaagcccggcagcagccccaagccctggatctacgccaccagcaacctggccagcggcgtgcccgtgaggttcagcggcagcggcagcggcaccagctacagcctgaccatcagcagggtggaggccgaggacgccgccacctactactgccagcagtggaccagcaacccccccaccttcggcggcggcaccaagctggagatcaaggagcccaagagctgcgacaagacccacacctgccccccctgccccgcccccgagctgctgggcggccccagcgtgttcctgttcccccccaagcccaaggacaccctgatgatcagcaggacccccgaggtgacctgcgtggtggtggacgtgagccacgaggaccccgaggtgaagttcaactggtacgtggacggcgtggaggtgcacaacgccaagaccaagcccagggaggagcagtacaacagcacctacagggtggtgagcgtgctgaccgtgctgcaccaggactggctgaacggcaaggagtacaagtgcaaggtgagcaacaaggccctgcccgcccccatcgagaagaccatcagcaaggccaagggccagcccagggagccccaggtgtacaccctgccccccagcagggaggagatgaccaagaaccaggtgagcctgacctgcctggtgaagggcttctaccccagcgacatcgccgtggagtgggagagcaacggccagcccgagaacaactacaagaccaccccccccgtgctggacagcgacggcagcttcttcctgtacagcaagctgaccgtggacaagagcaggtggcagcagggcaacgtgttcagctgcagcgtgatgcacgaggccctgcacaaccactacacccagaagagcctgagcctgagccccggcaag

SEQ ID NO: 581 - DNA, 1494 bp, Artificial Sequence
  Synthetic Construct
atgacctgcagccccctgctgctgaccctgctgatccactgcaccggcagctgggcccagatcgtgctgagccagagccccgccatcctgagcgccagccccggcgagaaggtgaccatgacctgcagggccagcagcagcgtgagctacatccactggttccagcagaagcccggcagcagccccaagccctggatctacgccaccagcaacctggccagcggcgtgcccgtgaggttcagcggcagcggcagcggcaccagctacagcctgaccatcagcagggtggaggccgaggacgccgccacctactactgccagcagtggaccagcaacccccccaccttcggcggcggcaccaagctggagatcaagggcggcggcggcagcggcggcggcggcagcggcggcggcggcagcggcggcggcggcagccaggtgcagctgcagcagcccggcgccgagctggtgaagcccggcgccagcgtgaagatgagctgcaaggccagcggctacaccttcaccagctacaacatgcactgggtgaagcagacccccggcaggggcctggagtggatcggcgccatctaccccggcaacggcgacaccagctacaaccagaagttcaagggcaaggccaccctgaccgccgacaagagcagcagcaccgcctacatgcagctgagcagcctgaccagcgaggacagcgccgtgtactactgcgccaggagcacctactacggcggcgactggtacttcaacgtgtggggcgccggcaccaccgtgaccgtgagcgccgagcccaagagctgcgacaagacccacacctgccccccctgccccgcccccgagctgctgggcggccccagcgtgttcctgttcccccccaagcccaaggacaccctgatgatcagcaggacccccgaggtgacctgcgtggtggtggacgtgagccacgaggaccccgaggtgaagttcaactggtacgtggacggcgtggaggtgcacaacgccaagaccaagcccagggaggagcagtacaacagcacctacagggtggtgagcgtgctgaccgtgctgcaccaggactggctgaacggcaaggagtacaagtgcaaggtgagcaacaaggccctgcccgcccccatcgagaagaccatcagcaaggccaagggccagcccagggagccccaggtgtacaccctgccccccagcagggaggagatgaccaagaaccaggtgagcctgacctgcctggtgaagggcttctaccccagcgacatcgccgtggagtgggagagcaacggccagcccgagaacaactacaagaccaccccccccgtgctggacagcgacggcagcttcttcctgtacagcaagctgaccgtggacaagagcaggtggcagcagggcaacgtgttcagctgcagcgtgatgcacgaggccctgcacaaccactacacccagaagagcctgagcctgagccccggcaag

SEQ ID NO: 582 - DNA, 1503 bp, Artificial Sequence
  Synthetic Construct
atggagttcggcctgagctggctgttcctggtggccatcctgaagggcgtgcagtgcgaggtgcagctggtggagagcggcggcggcctggtgcagcccggcggcagcctgaggctgagctgcgccgccagcggctacaccttcaccaactacggcatgaactgggtgaggcaggcccccggcaagggcctggagtgggtgggctggatcaacacctacaccggcgagcccacctacgccgccgacttcaagaggaggttcaccttcagcctggacaccagcaagagcaccgcctacctgcagatgaacagcctgagggccgaggacaccgccgtgtactactgcgccaagtacccccactactacggcagcagccactggtacttcgacgtgtggggccagggcaccctggtgaccgtgagcagcggcggcggcggcagcggcggcggcggcagcggcggcggcggcagcggcggcggcggcagcgacatccagatgacccagagccccagcagcctgagcgccagcgtgggcgacagggtgaccatcacctgcagcgccagccaggacatcagcaactacctgaactggtaccagcagaagcccggcaaggcccccaaggtgctgatctacttcaccagcagcctgcacagcggcgtgcccagcaggttcagcggcagcggcagcggcaccgacttcaccctgaccatcagcagcctgcagcccgaggacttcgccacctactactgccagcagtacagcaccgtgccctggaccttcggccagggcaccaaggtggagatcaaggagcccaagagctgcgacaagacccacacctgccccccctgccccgcccccgagctgctgggcggccccagcgtgttcctgttcccccccaagcccaaggacaccctgatgatcagcaggacccccgaggtgacctgcgtggtggtggacgtgagccacgaggaccccgaggtgaagttcaactggtacgtggacggcgtggaggtgcacaacgccaagaccaagcccagggaggagcagtacaacagcacctacagggtggtgagcgtgctgaccgtgctgcaccaggactggctgaacggcaaggagtacaagtgcaaggtgagcaacaaggccctgcccgcccccatcgagaagaccatcagcaaggccaagggccagcccagggagccccaggtgtacaccctgccccccagcagggaggagatgaccaagaaccaggtgagcctgacctgcctggtgaagggcttctaccccagcgacatcgccgtggagtgggagagcaacggccagcccgagaacaactacaagaccaccccccccgtgctggacagcgacggcagcttcttcctgtacagcaagctgaccgtggacaagagcaggtggcagcagggcaacgtgttcagctgcagcgtgatgcacgaggccctgcacaaccactacacccagaagagcctgagcctgagccccggcaag

SEQ ID NO: 583 - DNA, 1512 bp, Artificial Sequence
  Synthetic Construct
atggacatgagggtgcccgcccagctgctgggcctgctgctgctgtggctgaggggcgccaggtgcgacatccagatgacccagagccccagcagcctgagcgccagcgtgggcgacagggtgaccatcacctgcagcgccagccaggacatcagcaactacctgaactggtaccagcagaagcccggcaaggcccccaaggtgctgatctacttcaccagcagcctgcacagcggcgtgcccagcaggttcagcggcagcggcagcggcaccgacttcaccctgaccatcagcagcctgcagcccgaggacttcgccacctactactgccagcagtacagcaccgtgccctggaccttcggccagggcaccaaggtggagatcaagggcggcggcggcagcggcggcggcggcagcggcggcggcggcagcggcggcggcggcagcgaggtgcagctggtggagagcggcggcggcctggtgcagcccggcggcagcctgaggctgagctgcgccgccagcggctacaccttcaccaactacggcatgaactgggtgaggcaggcccccggcaagggcctggagtgggtgggctggatcaacacctacaccggcgagcccacctacgccgccgacttcaagaggaggttcaccttcagcctggacaccagcaagagcaccgcctacctgcagatgaacagcctgagggccgaggacaccgccgtgtactactgcgccaagtacccccactactacggcagcagccactggtacttcgacgtgtggggccagggcaccctggtgaccgtgagcagcgagcccaagagctgcgacaagacccacacctgccccccctgccccgcccccgagctgctgggcggccccagcgtgttcctgttcccccccaagcccaaggacaccctgatgatcagcaggacccccgaggtgacctgcgtggtggtggacgtgagccacgaggaccccgaggtgaagttcaactggtacgtggacggcgtggaggtgcacaacgccaagaccaagcccagggaggagcagtacaacagcacctacagggtggtgagcgtgctgaccgtgctgcaccaggactggctgaacggcaaggagtacaagtgcaaggtgagcaacaaggccctgcccgcccccatcgagaagaccatcagcaaggccaagggccagcccagggagccccaggtgtacaccctgccccccagcagggaggagatgaccaagaaccaggtgagcctgacctgcctggtgaagggcttctaccccagcgacatcgccgtggagtgggagagcaacggccagcccgagaacaactacaagaccaccccccccgtgctggacagcgacggcagcttcttcctgtacagcaagctgaccgtggacaagagcaggtggcagcagggcaacgtgttcagctgcagcgtgatgcacgaggccctgcacaaccactacacccagaagagcctgagcctgagccccggcaag

SEQ ID NO: 584 - DNA, 148 bp, Artificial Sequence
  Synthetic Construct
gaattcgtcgattcggttgcagcatttaaagcggttgacaactttaaaagaaggaaaaagaaggttgaagaaaagggtgtagtaagtaagtataagtacagaccggagaagtacgccggtcctgattcgtttaatttgaaagaagaaa

SEQ ID NO: 585 - DNA, 491 bp, Artificial Sequence
  Synthetic Construct
gttattttccaccatattgccgtcttttggcaatgtgagggcccggaaacctggccctgtcttcttgacgagcattcctaggggtctttcccctctcgccaaaggaatgcaaggtctgttgaatgtcgtgaaggaagcagttcctctggaagcttcttgaagacaaacaacgtctgtagcgaccctttgcaggcagcggaaccccccacctggcgacaggtgcctctgcggccaaaagccacgtgtataagatacacctgcaaaggcggcacaaccccagtgccacgttgtgagttggatagttgtggaaagagtcaaatggctcacctcaagcgtattcaacaaggggctgaaggatgcccagaaggtaccccattgtatgggatctgatctggggcctcggtgcacatgctttacatgtgtttagtcgaggttaaaaagcgtctaggccccccgaaccacggggacgtggttttcctttgaaaaacacg

SEQ ID NO: 586 - DNA, 2615 bp, Artificial Sequence
  Synthetic Construct
atggacatgagggtgcccgcccagctgctgggcctgctgctgctgtggctgaggggcgccaggtgcgacatccagatgacccagagccccagcagcctgagcgccagcgtgggcgacagggtgaccatcacctgcagggccagccagggcatcaggaactacctggcctggtaccagcagaagcccggcaaggcccccaagctgctgatctacgccgccagcaccctgcagagcggcgtgcccagcaggttcagcggcagcggcagcggcaccgacttcaccctgaccatcagcagcctgcagcccgaggacgtggccacctactactgccagaggtacaacagggccccctacaccttcggccagggcaccaaggtggagatcaagaggaccgtggccgcccccagcgtgttcatcttcccccccagcgacgagcagctgaagagcggcaccgccagcgtggtgtgcctgctgaacaacttctaccccagggaggccaaggtgcagtggaaggtggacaacgccctgcagagcggcaacagccaggagagcgtgaccgagcaggacagcaaggacagcacctacagcctgagcagcaccctgaccctgagcaaggccgactacgagaagcacaaggtgtacgcctgcgaggtgacccaccagggcctgagcagccccgtgaccaagagcttcaacaggggcgagtgctgagttattttccaccatattgccgtcttttggcaatgtgagggcccggaaacctggccctgtcttcttgacgagcattcctaggggtctttcccctctcgccaaaggaatgcaaggtctgttgaatgtcgtgaaggaagcagttcctctggaagcttcttgaagacaaacaacgtctgtagcgaccctttgcaggcagcggaaccccccacctggcgacaggtgcctctgcggccaaaagccacgtgtataagatacacctgcaaaggcggcacaaccccagtgccacgttgtgagttggatagttgtggaaagagtcaaatggctcacctcaagcgtattcaacaaggggctgaaggatgcccagaaggtaccccattgtatgggatctgatctggggcctcggtgcacatgctttacatgtgtttagtcgaggttaaaaagcgtctaggccccccgaaccacggggacgtggttttcctttgaaaaacacgatggagttcggcctgagctggctgttcctggtggccatcctgaagggcgtgcagtgcgaggtgcagctggtggagagcggcggcggcctggtgcagcccggcaggagcctgaggctgagctgcgccgccagcggcttcaccttcgacgactacgccatgcactgggtgaggcaggcccccggcaagggcctggagtgggtgagcgccatcacctggaacagcggccacatcgactacgccgacagcgtggagggcaggttcaccatcagcagggacaacgccaagaacagcctgtacctgcagatgaacagcctgagggccgaggacaccgccgtgtactactgcgccaaggtgagctacctgagcaccgccagcagcctggactactggggccagggcaccctggtgaccgtgagcagcgccagcaccaagggccccagcgtgttccccctggcccccagcagcaagagcaccagcggcggcaccgccgccctgggctgcctggtgaaggactacttccccgagcccgtgaccgtgagctggaacagcggcgccctgaccagcggcgtgcacaccttccccgccgtgctgcagagcagcggcctgtacagcctgagcagcgtggtgaccgtgcccagcagcagcctgggcacccagacctacatctgcaacgtgaaccacaagcccagcaacaccaaggtggacaagagggtggagcccaagagctgcgacaagacccacacctgccccccctgccccgcccccgagctgctgggcggccccagcgtgttcctgttcccccccaagcccaaggacaccctgatgatcagcaggacccccgaggtgacctgcgtggtggtggacgtgagccacgaggaccccgaggtgaagttcaactggtacgtggacggcgtggaggtgcacaacgccaagaccaagcccagggaggagcagtacaacagcacctacagggtggtgagcgtgctgaccgtgctgcaccaggactggctgaacggcaaggagtacaagtgcaaggtgagcaacaaggccctgcccgcccccatcgagaagaccatcagcaaggccaagggccagcccagggagccccaggtgtacaccctgccccccagcagggaggagatgaccaagaaccaggtgagcctgacctgcctggtgaagggcttctaccccagcgacatcgccgtggagtgggagagcaacggccagcccgagaacaactacaagaccaccccccccgtgctggacagcgacggcagcttcttcctgtacagcaagctgaccgtggacaagagcaggtggcagcagggcaacgtgttcagctgcagcgtgatgcacgaggccctgcacaaccactacacccagaagagcctgagcctgagccccggcaagtga

SEQ ID NO: 587 - DNA, 2606 bp, Artificial Sequence
  Synthetic Construct
atgacctgcagccccctgctgctgaccctgctgatccactgcaccggcagctgggcccagatcgtgctgagccagagccccgccatcctgagcgccagccccggcgagaaggtgaccatgacctgcagggccagcagcagcgtgagctacatccactggttccagcagaagcccggcagcagccccaagccctggatctacgccaccagcaacctggccagcggcgtgcccgtgaggttcagcggcagcggcagcggcaccagctacagcctgaccatcagcagggtggaggccgaggacgccgccacctactactgccagcagtggaccagcaacccccccaccttcggcggcggcaccaagctggagatcaagaggaccgtggccgcccccagcgtgttcatcttcccccccagcgacgagcagctgaagagcggcaccgccagcgtggtgtgcctgctgaacaacttctaccccagggaggccaaggtgcagtggaaggtggacaacgccctgcagagcggcaacagccaggagagcgtgaccgagcaggacagcaaggacagcacctacagcctgagcagcaccctgaccctgagcaaggccgactacgagaagcacaaggtgtacgcctgcgaggtgacccaccagggcctgagcagccccgtgaccaagagcttcaacaggggcgagtgctgagttattttccaccatattgccgtcttttggcaatgtgagggcccggaaacctggccctgtcttcttgacgagcattcctaggggtctttcccctctcgccaaaggaatgcaaggtctgttgaatgtcgtgaaggaagcagttcctctggaagcttcttgaagacaaacaacgtctgtagcgaccctttgcaggcagcggaaccccccacctggcgacaggtgcctctgcggccaaaagccacgtgtataagatacacctgcaaaggcggcacaaccccagtgccacgttgtgagttggatagttgtggaaagagtcaaatggctcacctcaagcgtattcaacaaggggctgaaggatgcccagaaggtaccccattgtatgggatctgatctggggcctcggtgcacatgctttacatgtgtttagtcgaggttaaaaagcgtctaggccccccgaaccacggggacgtggttttcctttgaaaaacacgatgaagcacctgtggttcctgctgctgtggtgccagctgcccgacgtgggcgtgctgagccaggtgcagctgcagcagcccggcgccgagctggtgaagcccggcgccagcgtgaagatgagctgcaaggccagcggctacaccttcaccagctacaacatgcactgggtgaagcagacccccggcaggggcctggagtggatcggcgccatctaccccggcaacggcgacaccagctacaaccagaagttcaagggcaaggccaccctgaccgccgacaagagcagcagcaccgcctacatgcagctgagcagcctgaccagcgaggacagcgccgtgtactactgcgccaggagcacctactacggcggcgactggtacttcaacgtgtggggcgccggcaccaccgtgaccgtgagcgccgccagcaccaagggccccagcgtgttccccctggcccccagcagcaagagcaccagcggcggcaccgccgccctgggctgcctggtgaaggactacttccccgagcccgtgaccgtgagctggaacagcggcgccctgaccagcggcgtgcacaccttccccgccgtgctgcagagcagcggcctgtacagcctgagcagcgtggtgaccgtgcccagcagcagcctgggcacccagacctacatctgcaacgtgaaccacaagcccagcaacaccaaggtggacaagagggtggagcccaagagctgcgacaagacccacacctgccccccctgccccgcccccgagctgctgggcggccccagcgtgttcctgttcccccccaagcccaaggacaccctgatgatcagcaggacccccgaggtgacctgcgtggtggtggacgtgagccacgaggaccccgaggtgaagttcaactggtacgtggacggcgtggaggtgcacaacgccaagaccaagcccagggaggagcagtacaacagcacctacagggtggtgagcgtgctgaccgtgctgcaccaggactggctgaacggcaaggagtacaagtgcaaggtgagcaacaaggccctgcccgcccccatcgagaagaccatcagcaaggccaagggccagcccagggagccccaggtgtacaccctgccccccagcagggaggagatgaccaagaaccaggtgagcctgacctgcctggtgaagggcttctaccccagcgacatcgccgtggagtgggagagcaacggccagcccgagaacaactacaagaccaccccccccgtgctggacagcgacggcagcttcttcctgtacagcaagctgaccgtggacaagagcaggtggcagcagggcaacgtgttcagctgcagcgtgatgcacgaggccctgcacaaccactacacccagaagagcctgagcctgagccccggcaagtga

SEQ ID NO: 588 - DNA, 2621 bp, Artificial Sequence
  Synthetic Construct
atggacatgagggtgcccgcccagctgctgggcctgctgctgctgtggctgaggggcgccaggtgcgacatccagatgacccagagccccagcagcctgagcgccagcgtgggcgacagggtgaccatcacctgcagcgccagccaggacatcagcaactacctgaactggtaccagcagaagcccggcaaggcccccaaggtgctgatctacttcaccagcagcctgcacagcggcgtgcccagcaggttcagcggcagcggcagcggcaccgacttcaccctgaccatcagcagcctgcagcccgaggacttcgccacctactactgccagcagtacagcaccgtgccctggaccttcggccagggcaccaaggtggagatcaagaggaccgtggccgcccccagcgtgttcatcttcccccccagcgacgagcagctgaagagcggcaccgccagcgtggtgtgcctgctgaacaacttctaccccagggaggccaaggtgcagtggaaggtggacaacgccctgcagagcggcaacagccaggagagcgtgaccgagcaggacagcaaggacagcacctacagcctgagcagcaccctgaccctgagcaaggccgactacgagaagcacaaggtgtacgcctgcgaggtgacccaccagggcctgagcagccccgtgaccaagagcttcaacaggggcgagtgctgagttattttccaccatattgccgtcttttggcaatgtgagggcccggaaacctggccctgtcttcttgacgagcattcctaggggtctttcccctctcgccaaaggaatgcaaggtctgttgaatgtcgtgaaggaagcagttcctctggaagcttcttgaagacaaacaacgtctgtagcgaccctttgcaggcagcggaaccccccacctggcgacaggtgcctctgcggccaaaagccacgtgtataagatacacctgcaaaggcggcacaaccccagtgccacgttgtgagttggatagttgtggaaagagtcaaatggctcacctcaagcgtattcaacaaggggctgaaggatgcccagaaggtaccccattgtatgggatctgatctggggcctcggtgcacatgctttacatgtgtttagtcgaggttaaaaagcgtctaggccccccgaaccacggggacgtggttttcctttgaaaaacacgatggagttcggcctgagctggctgttcctggtggccatcctgaagggcgtgcagtgcgaggtgcagctggtggagagcggcggcggcctggtgcagcccggcggcagcctgaggctgagctgcgccgccagcggctacaccttcaccaactacggcatgaactgggtgaggcaggcccccggcaagggcctggagtgggtgggctggatcaacacctacaccggcgagcccacctacgccgccgacttcaagaggaggttcaccttcagcctggacaccagcaagagcaccgcctacctgcagatgaacagcctgagggccgaggacaccgccgtgtactactgcgccaagtacccccactactacggcagcagccactggtacttcgacgtgtggggccagggcaccctggtgaccgtgagcagcgccagcaccaagggccccagcgtgttccccctggcccccagcagcaagagcaccagcggcggcaccgccgccctgggctgcctggtgaaggactacttccccgagcccgtgaccgtgagctggaacagcggcgccctgaccagcggcgtgcacaccttccccgccgtgctgcagagcagcggcctgtacagcctgagcagcgtggtgaccgtgcccagcagcagcctgggcacccagacctacatctgcaacgtgaaccacaagcccagcaacaccaaggtggacaagagggtggagcccaagagctgcgacaagacccacacctgccccccctgccccgcccccgagctgctgggcggccccagcgtgttcctgttcccccccaagcccaaggacaccctgatgatcagcaggacccccgaggtgacctgcgtggtggtggacgtgagccacgaggaccccgaggtgaagttcaactggtacgtggacggcgtggaggtgcacaacgccaagaccaagcccagggaggagcagtacaacagcacctacagggtggtgagcgtgctgaccgtgctgcaccaggactggctgaacggcaaggagtacaagtgcaaggtgagcaacaaggccctgcccgcccccatcgagaagaccatcagcaaggccaagggccagcccagggagccccaggtgtacaccctgccccccagcagggaggagatgaccaagaaccaggtgagcctgacctgcctggtgaagggcttctaccccagcgacatcgccgtggagtgggagagcaacggccagcccgagaacaactacaagaccaccccccccgtgctggacagcgacggcagcttcttcctgtacagcaagctgaccgtggacaagagcaggtggcagcagggcaacgtgttcagctgcagcgtgatgcacgaggccctgcacaaccactacacccagaagagcctgagcctgagccccggcaagtga

SEQ ID NO: 589 - protein, 25 aa, Artificial Sequence
  Synthetic Construct
RAKRGSGEGRGSLLTCGDVEENPGP

SEQ ID NO: 590 - protein, 22 aa, Artificial Sequence
  Synthetic Construct
GSGATNFSLLKQAGDVEENPGP

SEQ ID NO: 591 - protein, 23 aa, Artificial Sequence
  Synthetic Construct
GSGQCTNYALLKLAGDVESNPGP

SEQ ID NO: 592 - protein, 25 aa, Artificial Sequence
  Synthetic Construct
GSGVKQTLNFDLLKLAGDVESNPGP

SEQ ID NO: 593 - DNA, 2196 bp, Artificial Sequence
  Synthetic Construct
atggacatgagggtgcccgcccagctgctgggcctgctgctgctgtggctgaggggcgccaggtgcgacatccagatgacccagagccccagcagcctgagcgccagcgtgggcgacagggtgaccatcacctgcagggccagccagggcatcaggaactacctggcctggtaccagcagaagcccggcaaggcccccaagctgctgatctacgccgccagcaccctgcagagcggcgtgcccagcaggttcagcggcagcggcagcggcaccgacttcaccctgaccatcagcagcctgcagcccgaggacgtggccacctactactgccagaggtacaacagggccccctacaccttcggccagggcaccaaggtggagatcaagaggaccgtggccgcccccagcgtgttcatcttcccccccagcgacgagcagctgaagagcggcaccgccagcgtggtgtgcctgctgaacaacttctaccccagggaggccaaggtgcagtggaaggtggacaacgccctgcagagcggcaacagccaggagagcgtgaccgagcaggacagcaaggacagcacctacagcctgagcagcaccctgaccctgagcaaggccgactacgagaagcacaaggtgtacgcctgcgaggtgacccaccagggcctgagcagccccgtgaccaagagcttcaacaggggcgagtgcagggccaagaggggcagcggcgagggcaggggcagcctgctgacctgcggcgacgtggaggagaaccccggccccatggagttcggcctgagctggctgttcctggtggccatcctgaagggcgtgcagtgcgaggtgcagctggtggagagcggcggcggcctggtgcagcccggcaggagcctgaggctgagctgcgccgccagcggcttcaccttcgacgactacgccatgcactgggtgaggcaggcccccggcaagggcctggagtgggtgagcgccatcacctggaacagcggccacatcgactacgccgacagcgtggagggcaggttcaccatcagcagggacaacgccaagaacagcctgtacctgcagatgaacagcctgagggccgaggacaccgccgtgtactactgcgccaaggtgagctacctgagcaccgccagcagcctggactactggggccagggcaccctggtgaccgtgagcagcgccagcaccaagggccccagcgtgttccccctggcccccagcagcaagagcaccagcggcggcaccgccgccctgggctgcctggtgaaggactacttccccgagcccgtgaccgtgagctggaacagcggcgccctgaccagcggcgtgcacaccttccccgccgtgctgcagagcagcggcctgtacagcctgagcagcgtggtgaccgtgcccagcagcagcctgggcacccagacctacatctgcaacgtgaaccacaagcccagcaacaccaaggtggacaagagggtggagcccaagagctgcgacaagacccacacctgccccccctgccccgcccccgagctgctgggcggccccagcgtgttcctgttcccccccaagcccaaggacaccctgatgatcagcaggacccccgaggtgacctgcgtggtggtggacgtgagccacgaggaccccgaggtgaagttcaactggtacgtggacggcgtggaggtgcacaacgccaagaccaagcccagggaggagcagtacaacagcacctacagggtggtgagcgtgctgaccgtgctgcaccaggactggctgaacggcaaggagtacaagtgcaaggtgagcaacaaggccctgcccgcccccatcgagaagaccatcagcaaggccaagggccagcccagggagccccaggtgtacaccctgccccccagcagggaggagatgaccaagaaccaggtgagcctgacctgcctggtgaagggcttctaccccagcgacatcgccgtggagtgggagagcaacggccagcccgagaacaactacaagaccaccccccccgtgctggacagcgacggcagcttcttcctgtacagcaagctgaccgtggacaagagcaggtggcagcagggcaacgtgttcagctgcagcgtgatgcacgaggccctgcacaaccactacacccagaagagcctgagcctgagccccggcaagtga

SEQ ID NO: 594 - DNA, 2187 bp, Artificial Sequence
  Synthetic Construct
atgacctgcagccccctgctgctgaccctgctgatccactgcaccggcagctgggcccagatcgtgctgagccagagccccgccatcctgagcgccagccccggcgagaaggtgaccatgacctgcagggccagcagcagcgtgagctacatccactggttccagcagaagcccggcagcagccccaagccctggatctacgccaccagcaacctggccagcggcgtgcccgtgaggttcagcggcagcggcagcggcaccagctacagcctgaccatcagcagggtggaggccgaggacgccgccacctactactgccagcagtggaccagcaacccccccaccttcggcggcggcaccaagctggagatcaagaggaccgtggccgcccccagcgtgttcatcttcccccccagcgacgagcagctgaagagcggcaccgccagcgtggtgtgcctgctgaacaacttctaccccagggaggccaaggtgcagtggaaggtggacaacgccctgcagagcggcaacagccaggagagcgtgaccgagcaggacagcaaggacagcacctacagcctgagcagcaccctgaccctgagcaaggccgactacgagaagcacaaggtgtacgcctgcgaggtgacccaccagggcctgagcagccccgtgaccaagagcttcaacaggggcgagtgcagggccaagaggggcagcggcgagggcaggggcagcctgctgacctgcggcgacgtggaggagaaccccggccccatgaagcacctgtggttcctgctgctgtggtgccagctgcccgacgtgggcgtgctgagccaggtgcagctgcagcagcccggcgccgagctggtgaagcccggcgccagcgtgaagatgagctgcaaggccagcggctacaccttcaccagctacaacatgcactgggtgaagcagacccccggcaggggcctggagtggatcggcgccatctaccccggcaacggcgacaccagctacaaccagaagttcaagggcaaggccaccctgaccgccgacaagagcagcagcaccgcctacatgcagctgagcagcctgaccagcgaggacagcgccgtgtactactgcgccaggagcacctactacggcggcgactggtacttcaacgtgtggggcgccggcaccaccgtgaccgtgagcgccgccagcaccaagggccccagcgtgttccccctggcccccagcagcaagagcaccagcggcggcaccgccgccctgggctgcctggtgaaggactacttccccgagcccgtgaccgtgagctggaacagcggcgccctgaccagcggcgtgcacaccttccccgccgtgctgcagagcagcggcctgtacagcctgagcagcgtggtgaccgtgcccagcagcagcctgggcacccagacctacatctgcaacgtgaaccacaagcccagcaacaccaaggtggacaagagggtggagcccaagagctgcgacaagacccacacctgccccccctgccccgcccccgagctgctgggcggccccagcgtgttcctgttcccccccaagcccaaggacaccctgatgatcagcaggacccccgaggtgacctgcgtggtggtggacgtgagccacgaggaccccgaggtgaagttcaactggtacgtggacggcgtggaggtgcacaacgccaagaccaagcccagggaggagcagtacaacagcacctacagggtggtgagcgtgctgaccgtgctgcaccaggactggctgaacggcaaggagtacaagtgcaaggtgagcaacaaggccctgcccgcccccatcgagaagaccatcagcaaggccaagggccagcccagggagccccaggtgtacaccctgccccccagcagggaggagatgaccaagaaccaggtgagcctgacctgcctggtgaagggcttctaccccagcgacatcgccgtggagtgggagagcaacggccagcccgagaacaactacaagaccaccccccccgtgctggacagcgacggcagcttcttcctgtacagcaagctgaccgtggacaagagcaggtggcagcagggcaacgtgttcagctgcagcgtgatgcacgaggccctgcacaaccactacacccagaagagcctgagcctgagccccggcaagtga

SEQ ID NO: 595 - DNA, 2202 bp, Artificial Sequence
  Synthetic Construct
atggacatgagggtgcccgcccagctgctgggcctgctgctgctgtggctgaggggcgccaggtgcgacatccagatgacccagagccccagcagcctgagcgccagcgtgggcgacagggtgaccatcacctgcagcgccagccaggacatcagcaactacctgaactggtaccagcagaagcccggcaaggcccccaaggtgctgatctacttcaccagcagcctgcacagcggcgtgcccagcaggttcagcggcagcggcagcggcaccgacttcaccctgaccatcagcagcctgcagcccgaggacttcgccacctactactgccagcagtacagcaccgtgccctggaccttcggccagggcaccaaggtggagatcaagaggaccgtggccgcccccagcgtgttcatcttcccccccagcgacgagcagctgaagagcggcaccgccagcgtggtgtgcctgctgaacaacttctaccccagggaggccaaggtgcagtggaaggtggacaacgccctgcagagcggcaacagccaggagagcgtgaccgagcaggacagcaaggacagcacctacagcctgagcagcaccctgaccctgagcaaggccgactacgagaagcacaaggtgtacgcctgcgaggtgacccaccagggcctgagcagccccgtgaccaagagcttcaacaggggcgagtgcagggccaagaggggcagcggcgagggcaggggcagcctgctgacctgcggcgacgtggaggagaaccccggccccatggagttcggcctgagctggctgttcctggtggccatcctgaagggcgtgcagtgcgaggtgcagctggtggagagcggcggcggcctggtgcagcccggcggcagcctgaggctgagctgcgccgccagcggctacaccttcaccaactacggcatgaactgggtgaggcaggcccccggcaagggcctggagtgggtgggctggatcaacacctacaccggcgagcccacctacgccgccgacttcaagaggaggttcaccttcagcctggacaccagcaagagcaccgcctacctgcagatgaacagcctgagggccgaggacaccgccgtgtactactgcgccaagtacccccactactacggcagcagccactggtacttcgacgtgtggggccagggcaccctggtgaccgtgagcagcgccagcaccaagggccccagcgtgttccccctggcccccagcagcaagagcaccagcggcggcaccgccgccctgggctgcctggtgaaggactacttccccgagcccgtgaccgtgagctggaacagcggcgccctgaccagcggcgtgcacaccttccccgccgtgctgcagagcagcggcctgtacagcctgagcagcgtggtgaccgtgcccagcagcagcctgggcacccagacctacatctgcaacgtgaaccacaagcccagcaacaccaaggtggacaagagggtggagcccaagagctgcgacaagacccacacctgccccccctgccccgcccccgagctgctgggcggccccagcgtgttcctgttcccccccaagcccaaggacaccctgatgatcagcaggacccccgaggtgacctgcgtggtggtggacgtgagccacgaggaccccgaggtgaagttcaactggtacgtggacggcgtggaggtgcacaacgccaagaccaagcccagggaggagcagtacaacagcacctacagggtggtgagcgtgctgaccgtgctgcaccaggactggctgaacggcaaggagtacaagtgcaaggtgagcaacaaggccctgcccgcccccatcgagaagaccatcagcaaggccaagggccagcccagggagccccaggtgtacaccctgccccccagcagggaggagatgaccaagaaccaggtgagcctgacctgcctggtgaagggcttctaccccagcgacatcgccgtggagtgggagagcaacggccagcccgagaacaactacaagaccaccccccccgtgctggacagcgacggcagcttcttcctgtacagcaagctgaccgtggacaagagcaggtggcagcagggcaacgtgttcagctgcagcgtgatgcacgaggccctgcacaaccactacacccagaagagcctgagcctgagccccggcaagtga

SEQ ID NO: 596 - protein, 330 aa, Homo sapiens [sequence omitted]

SEQ ID NO: 597 - protein, 330 aa, Homo sapiens
ASTKGPSVFPLAPSSKSTSGGTAALGCLVKDYFPEPVTVSWNSGALTSGVHTFPAVLQSSGLYSLSSVVTVPSSSLGTQTYICNVNHKPSNTKVDKRVEPKSCDKTHTCPPCPAPELLGGPSVFLFPPKPKDTLMISRTPEVTCVVVDVSHEDPEVKFNWYVDGVEVHNAKTKPREEQYNSTYRVVSVLTVLHQDWLNGKEYKCKVSNKALPAPIEKTISKAKGQPREPQVYTLPPSREEMTKNQVSLTCLVKGFYPSDIAVEWESNGQPENNYKTTPPVLDSDGSFFLYSKLTVDKSRWQQGNVFSCSVMHEALHNHYTQKSLSLSPGK

SEQ ID NO: 598 - protein, 326 aa, Homo sapiens
ASTKGPSVFPLAPCSRSTSESTAALGCLVKDYFPEPVTVSWNSGALTSGVHTFPAVLQSSGLYSLSSVVTVPSSNFGTQTYTCNVDHKPSNTKVDKTVERKCCVECPPCPAPPVAGPSVFLFPPKPKDTLMISRTPEVTCVVVDVSHEDPEVQFNWYVDGVEVHNAKTKPREEQFNSTFRVVSVLTVVHQDWLNGKEYKCKVSNKGLPAPIEKTISKTKGQPREPQVYTLPPSREEMTKNQVSLTCLVKGFYPSDISVEWESNGQPENNYKTTPPMLDSDGSFFLYSKLTVDKSRWQQGNVFSCSVMHEALHNHYTQKSLSLSPGK

SEQ ID NO: 599 - protein, 377 aa, Homo sapiens
ASTKGPSVFPLAPCSRSTSGGTAALGCLVKDYFPEPVTVSWNSGALTSGVHTFPAVLQSSGLYSLSSVVTVPSSSLGTQTYTCNVNHKPSNTKVDKRVELKTPLGDTTHTCPRCPEPKSCDTPPPCPRCPEPKSCDTPPPCPRCPEPKSCDTPPPCPRCPAPELLGGPSVFLFPPKPKDTLMISRTPEVTCVVVDVSHEDPEVQFKWYVDGVEVHNAKTKPREEQYNSTFRVVSVLTVLHQDWLNGKEYKCKVSNKALPAPIEKTISKTKGQPREPQVYTLPPSREEMTKNQVSLTCLVKGFYPSDIAVEWESSGQPENNYNTTPPMLDSDGSFFLYSKLTVDKSRWQQGNIFSCSVMHEALHNRFTQKSLSLSPGK

SEQ ID NO: 600 - protein, 327 aa, Homo sapiens
ASTKGPSVFPLAPCSRSTSESTAALGCLVKDYFPEPVTVSWNSGALTSGVHTFPAVLQSSGLYSLSSVVTVPSSSLGTKTYTCNVDHKPSNTKVDKRVESKYGPPCPSCPAPEFLGGPSVFLFPPKPKDTLMISRTPEVTCVVVDVSQEDPEVQFNWYVDGVEVHNAKTKPREEQFNSTYRVVSVLTVLHQDWLNGKEYKCKVSNKGLPSSIEKTISKAKGQPREPQVYTLPPSQEEMTKNQVSLTCLVKGFYPSDIAVEWESNGQPENNYKTTPPVLDSDGSFFLYSRLTVDKSRWQEGNVFSCSVMHEALHNHYTQKSLSLSLGK

SEQ ID NO: 601 - protein, 107 aa, Homo sapiens [sequence omitted]

SEQ ID NO: 602 - protein, 106 aa, Homo sapiens
GQPKANPTVTLFPPSSEELQANKATLVCLISDFYPGAVTVAWKADGSPVKAGVETTKPSKQSNNKYAASSYLSLTPEQWKSHRSYSCQVTHEGSTVEKTVAPTECS

SEQ ID NO: 603 - protein, 15 aa, Homo sapiens
EPKSCDKTHTCPPCP

SEQ ID NO: 604 - protein, 217 aa, Homo sapiens
APELLGGPSVFLFPPKPKDTLMISRTPEVTCVVVDVSHEDPEVKFNWYVDGVEVHNAKTKPREEQYNSTYRVVSVLTVLHQDWLNGKEYKCKVSNKALPAPIEKTISKAKGQPREPQVYTLPPSREEMTKNQVSLTCLVKGFYPSDIAVEWESNGQPENNYKTTPPVLDSDGSFFLYSKLTVDKSRWQQGNVFSCSVMHEALHNHYTQKSLSLSPGK

SEQ ID NO: 605 - protein, 5 aa, Artificial Sequence
  Synthetic Construct
SYAMS

SEQ ID NO: 606 - protein, 17 aa, Artificial Sequence
  Synthetic Construct
GIIPIFGTVNYAQKFQG

SEQ ID NO: 607 - protein, 8 aa, Artificial Sequence
  Synthetic Construct
GRLRYFDV

SEQ ID NO: 608 - protein, 7 aa, Artificial Sequence
  Synthetic Construct
DRGSLYY

SEQ ID NO: 609 - protein, 8 aa, Artificial Sequence
  Synthetic Construct
RRGAKFDY

SEQ ID NO: 610 - protein, 11 aa, Artificial Sequence
  Synthetic Construct
RPSQGINWELA

SEQ ID NO: 611 - protein, 13 aa, Artificial Sequence
  Synthetic Construct
SGSTSNIGSHYVV

SEQ ID NO: 612 - protein, 9 aa, Artificial Sequence
  Synthetic Construct
QQFNSYPLT

SEQ ID NO: 613 - protein, 11 aa, Artificial Sequence
  Synthetic Construct
AVWDDTLSGWV

SEQ ID NO: 614 - protein, 117 aa, Artificial Sequence
  Synthetic Construct
EVQLQQSGPELVKPGASVRMSCKASGYTFTDYNIHWVKQSHGKSLEWIGYIYPNNGDNGYNQKFRGKATLTVDKSSSTAYMELRSLTSDDSAVYYCARGRLRYFDVWGTGTTVTVSS

SEQ ID NO: 615 - protein, 116 aa, Artificial Sequence
  Synthetic Construct
EVQLVESGGDLVQPGGSLRLSCAASGFTFSSYWMSWVRQAPGKGLEWVANIKQDGSEKYYVDSVKGRFTISRDNAKNSLYLQMNSLRAEDTAVYYCARDRGSLYYWGQGTLVTVSS

SEQ ID NO: 616 - protein, 117 aa, Artificial Sequence
  Synthetic Construct
QVQLVQSGAEVKKPGSSVKVSCKASEGTFSSYAMSWVRQAPGQGLEWMGGIIPIFGTVNYAQKFQGRVTMTRDTSTSTVYMELSSLRSDDTAVYYCARRRGAKFDYWGQGTLVTVSS

SEQ ID NO: 617 - protein, 119 aa, Artificial Sequence
  Synthetic Construct
EVQLQQSGAELVKPGASVKLSCTASGFNIKDTYVHWVKQRPEQGLEWIGRIDPANGYTKYDPKFQGKATITADTSSNTAYLQLSSLTSEDTAVYYCVRPLYDYYAMDYWGQGTSVTVSS

SEQ ID NO: 618 - protein, 118 aa, Artificial Sequence [sequence omitted]

SEQ ID NO: 619 - protein, 118 aa, Artificial Sequence [sequence omitted]

SEQ ID NO: 620 - protein, 122 aa, Artificial Sequence
  Synthetic Construct
QVQLVESGGGVVQPGRSLRLSCAASGFSFSNYGMHWVRQAPGKGLEWVALIWYDGSNEDYTDSVKGRFTISRDNSKNTLYLQMNSLRAEDTAVYYCARWGMVRGVIDVFDIWGQGTVVTVSS

SEQ ID NO: 621 - protein, 124 aa, Artificial Sequence
  Synthetic Construct
QVQLVESGGGVVQPGRSLRLSCAASGFAFSSYGMHWVRQAPGKGLEWVAVIWFDGTKKYYTDSVKGRFTISRDNSKNTLYLQMNTLRAEDTAVYYCARDRGIGARRGPYYMDVWGKGTTVTVSS

SEQ ID NO: 622 - protein, 123 aa, Artificial Sequence
  Synthetic Construct
EVQLVESGGGLVQPGRSLRLSCAASGFTFDDYAMHWVRQAPGKGLEWVSGINWSSGGIGYADSVKGRFTISRDNAKNSLYLQMNSLRAEDTALYYCARDIGGFGEFYWNFGLWGRGTLVTVSS

SEQ ID NO: 623 - protein, 119 aa, Artificial Sequence
  Synthetic Construct
QVQLQQSGPELEKPGASVKISCKASGYSFTGYTMNWVKQSHGKSLEWIGLITPYNGASSYNQKFRGKATLTVDKSSSTAYMDLLSLTSEDSAVYFCARGGYDGRGFDYWGSGTPVTVSS

SEQ ID NO: 624 - protein, 115 aa, Artificial Sequence
  Synthetic Construct
QVQLQESGPGLVKPSETLSLTCTVSGFSLLSYGVHWVRQPPGKGLEWLGVIWTGGTTNYNSALMSRFTISKDDSKNTVYLKMNSLKTEDTAIYYCARYYYGMDYWGQGTLVTVSS

SEQ ID NO: 625 - protein, 120 aa, Artificial Sequence
  Synthetic Construct
QVELVQSGAEVKKPGESLKISCKGSGYSFTSYWIGWVRQAPGKGLEWMGIIDPGDSRTRYSPSFQGQVTISADKSISTAYLQWSSLKASDTAMYYCARGQLYGGTYMDGWGQGTLVTVSS

SEQ ID NO: 626 - protein, 118 aa, Artificial Sequence
  Synthetic Construct
EVQLVESGGGLVQPGGSLRLSCAASGFTFISYAMSWVRQAPGKGLEWVASISSGGNTYYPDSVKGRFTISRDNAKNSLYLQMNSLRAEDTAVYYCARLDGYYFGFAYWGQGTLVTVSS

SEQ ID NO: 627 - protein, 122 aa, Artificial Sequence
  Synthetic Construct
EVQLLESGGGLVQPGGSLRLSCAASGFTFSSYAMSWVRQAPGKGLEWVSAISGSGTSTYYADSVKGRFTISRDNSKNTLYLQMNSLRAEDTAVYYCARVRYNWNHGDWFDPWGQGTLVTVSS

SEQ ID NO: 628 - protein, 121 aa, Artificial Sequence
  Synthetic Construct
EVKLVESGGGLVQPGGSLRLSCATSGFTFTDYYMNWVRQPPGKALEWLGFIGNKANGYTTEYSASVKGRFTISRDKSQSILYLQMNTLRAEDSATYYCTRDRGLRFYFDYWGQGTTLTVSS

SEQ ID NO: 629 - protein, 117 aa, Artificial Sequence
  Synthetic Construct
EVQLVESGGGLVQPGGSLRLSCAASGFTFSSYGMSWVRQAPGKGLEWVATITSGGSYTYYVDSVKGRFTISRDNAKNTLYLQMNSLRAEDTAVYYCVRIGEDALDYWGQGTLVTVSS

SEQ ID NO: 630 - protein, 120 aa, Artificial Sequence
  Synthetic Construct
EVQLLESGGGLVQPGGSLRLSCAASGFTFSSYIMMWVRQAPGKGLEWVSSIYPSGGITFYADTVKGRFTISRDNSKNTLYLQMNSLRAEDTAVYYCARIKLGTVTTVDYWGQGTLVTVSS

SEQ ID NO: 631 - protein, 117 aa, Artificial Sequence
  Synthetic Construct
EVQLVESGGGLVQPGGSLRLSCAASGFTFSDYYMAWVRQAPGKGLEWVASINYDGSSTYYVDSVKGRFTISRDNAKNSLYLQMNSLRAEDTAVYYCARDRGYYFDYWGQGTTVTVSS

SEQ ID NO: 632 - protein, 119 aa, Artificial Sequence [sequence omitted]

SEQ ID NO: 633 - protein, 120 aa, Artificial Sequence
  Synthetic Construct
EVQLQQSGPELEKPGASVKLSCKASGYSFTGYNMNWVKQSHGKSLEWIGHIDPYYGDTSYNQKFRGKATLTVDKSSSTAYMQLKSLTSEDSAVYYCVKGGYYGHWYFDVWGAGTTVTVSS

SEQ ID NO: 634 - protein, 120 aa, Artificial Sequence
  Synthetic Construct
QVQLQQSGAELVKPGASVKLSCKASGYTFRSYDINWVRQRPEQGLEWIGWIFPGDGSTKYNEKFKGKATLTTDKSSSTAYMQLSRLTSEDSAVYFCARWTVVGPGYFDVWGAGTTVTVSS

SEQ ID NO: 635 - protein, 121 aa, Artificial Sequence
  Synthetic Construct
QVQLVQSGAEVKKPGSSVKVSCKASGGTFSNYWMHWVRQAPGQGLEWMGATYRGHSDTYYNQKFKGRVTITADKSTSTAYMELSSLRSEDTAVYYCARGAIYDGYDVLDNWGQGTLVTVSS

SEQ ID NO: 636 - protein, 114 aa, Artificial Sequence [sequence omitted]

SEQ ID NO: 637 - protein, 121 aa, Artificial Sequence [sequence omitted]

SEQ ID NO: 638 - protein, 119 aa, Artificial Sequence
  Synthetic Construct
ELQLQESGPGLVKPSETLSLTCTVSGGSISSGSYYWDWIRQPPGKGLEWIGNIYKSGSTYYNPSLKSRVTISVDTSKNQFSLKLSSVTAADTAVYYCARERGMHYMDVWGKGTTVTVSS

SEQ ID NO: 639 - protein, 117 aa, Artificial Sequence
  Synthetic Construct
EVQLLESGGGLVQPGGSLRLSCAASGFTFSNAWMSWVRQAPGKGLEWVAFIWYDGSNKYYADSVKGRFTISRDNSKNTLYLQMNSLRAEDTAVYYCARYSGWYFDYWGQGTLVTVSS

SEQ ID NO: 640 - protein, 119 aa, Artificial Sequence
  Synthetic Construct
EVQLVQSGAEVKKSGESLKISCKGSGYSFTSYWIGWVRQMPGKGLEWMGIFYPGDSSTRYSPSFQGQVTISADKSVNTAYLQWSSLKASDTAMYYCARRRNWGNAFDIWGQGTMVTVSS

SEQ ID NO: 641 - protein, 125 aa, Artificial Sequence
  Synthetic Construct
EVQLVESGGGLVQPGGSLRLSCAASGFTFSDYNMAWVRQAPGKGLEWVATITYEGRNTYYRDSVKGRFTISRDNAKNSLYLQMNSLRAEDTAVYYCASPPQYYEGSIYRLWFAHWGQGTLVTVSS

SEQ ID NO: 642 - protein, 119 aa, Artificial Sequence
  Synthetic Construct
EVQLVESGGGLVQPGGSLRLSCAASGFTFNTYAMYWIRQAPGKGLEWVARIRSKSNNYAIYYADSVKDRFTISRDDSKNSLYLQMNSLKTEDTAVYYCARPYSDSFAYWGQGTLVTVSS

SEQ ID NO: 643 - protein, 121 aa, Artificial Sequence
  Synthetic Construct
QLQLQESGPGLLKPSETLSLTCTVSGGSISSPGYYGGWIRQPPGKGLEWIGSIYKSGSTYHNPSLKSRVTISVDTSKNQFSLKLSSVTAADTAVYYCTRPVVRYFGWFDPWGQGTLVTVSS

SEQ ID NO: 644 - protein, 124 aa, Artificial Sequence
  Synthetic Construct
QVQLQQSGAELVRPGSSVKISCKASGYAFSSYWMNWVKQRPGQGLEWIGQIWPGDGDTNYNGKFKGKATLTADESSSTAYMQLSSLASEDSAVYFCARRETTTVGRYYYAMDYWGQGTTVTVSS

SEQ ID NO: 645 - protein, 113 aa, Artificial Sequence
  Synthetic Construct
QVQLQQSRAELVRPGASVTLSCKPSGYTFTDYEVHWVKQTPVHGLEWIGAIDPETGGTADNQKFKGKAILTADKSSSTAYMELRSLTSEDSAVYYCTNFVDVWGTGTTVTVSS

SEQ ID NO: 646 - protein, 118 aa, Artificial Sequence [sequence omitted]

SEQ ID NO: 647 - protein, 118 aa, Artificial Sequence
  Synthetic Construct
QVQLVQSGAEVKKPGASVKVSCKASGYTFTSYYMHWVRQAPGQGLEWMGEISPFGGRTNYNEKFKSRVTMTRDTSTSTVYMELSSLRSEDTAVYYCARERPLYASDLWGQGTTVTVSS

SEQ ID NO: 648 - protein, 124 aa, Artificial Sequence
  Synthetic Construct
QVQLVESGGGVVQPGRSLRLSCAASGFTFSSYGMHWVRQAPGKGLEWVAVIWYDGSNEYYADSVKGRFTISRDNSKNTLYLQMNSLRAEDTAVYYCARDRGYTSSWYPDAFDIWGQGTMVTVSS

SEQ ID NO: 649 - protein, 117 aa, Artificial Sequence
  Synthetic Construct
QIQLQQSGPEVVKPGASVKISCKASGYTFTDYYITWVKQKPGQGLEWIGWIYPGSGNTKYNEKFKGKATLTVDTSSSTAFMQLSSLTSEDTAVYFCANYGNYWFAYWGQGTQVTVSA

SEQ ID NO: 650 - protein, 115 aa, Artificial Sequence [sequence omitted]

SEQ ID NO: 651 - protein, 120 aa, Artificial Sequence
  Synthetic Construct
EVQLVESGGGLVQPGGSLRLSCTASGFSLTDYYYMTWVRQAPGKGLEWVGFIDPDDDPYYATWAKGRFTISRDNSKNTLYLQMNSLRAEDTAVYYCAGGDHNSGWGLDIWGQGTLVTVSS

SEQ ID NO: 652 - protein, 121 aa, Artificial Sequence
  Synthetic Construct
QVQLVQSGAEVKKPGASVKISCKVSGYTLRGYWIEWVRQAPGKGLEWIGQILPGTGRTNYNEKFKGRVTMTADTSTDTAYMELSSLRSEDTAVYYCARFDGNYGYYAMDYWGQGTTVTVSS

SEQ ID NO: 653 - protein, 117 aa, Artificial Sequence
  Synthetic Construct
QVQLVQSGAEVKKPGASVKVSCKASGYTFTNHYMHWVRQAPGQGLEWMGIINPISGSTSNAQKFQGRVTMTRDTSTSTVYMELSSLRSEDTAVYYCARDIVDAFDFWGQGTMVTVSS

SEQ ID NO: 654 - protein, 122 aa, Artificial Sequence
  Synthetic Construct
QVQLVQSGAEVKKPGSSVKVSCKASGYTFTDNYMIWVRQAPGQGLEWMGDINPYNGGTTFNQKFKGRVTITADKSTSTAYMELSSLRSEDTAVYYCARESPYFSNLYVMDYWGQGTLVTVSS

SEQ ID NO: 655 - protein, 115 aa, Artificial Sequence
  Synthetic Construct
QVQLVQSGAEVKKPGSSVKVSCKASGGTFSRYIINWVRQAPGQGLEWMGRIIPILGVENYAQKFQGRVTITADKSTSTAYMELSSLRSEDTAVYYCARKDWFDYWGQGTLVTVSS

SEQ ID NO: 656 - protein, 116 aa, Artificial Sequence
  Synthetic Construct
EVQLVESGGGLVQPGGSLRLSCAASGFTFSSYMMSWVRQAPGKGLEWVATISGGGANTYYPDSVKGRFTISRDNAKNSLYLQMNSLRAEDTAVYYCARQLYYFDYWGQGTTVTVSS

SEQ ID NO: 657 - protein, 119 aa, Artificial Sequence
  Synthetic Construct
QVQLVQSGAEVKKPGETVKISCKASDYTFTYYGMNWVKQAPGQGLKWMGWIDTTTGEPTYAQKFQGRIAFSLETSASTAYLQIKSLKSEDTATYFCARRGPYNWYFDVWGQGTTVTVSS

SEQ ID NO: 658 - protein, 119 aa, Artificial Sequence
  Synthetic Construct
QVQLVQSGAEVKKPGSSVKVSCKASGGTFSSYGISWVRQAPGQGLEWMGGIIPIFGTANYAQKFQGRVTITADESTSTAYMELSSLRSEDTAVYYCARYDGIYGELDFWGQGTLVTVSS

SEQ ID NO: 659 - protein, 118 aa, Artificial Sequence
  Synthetic Construct
EVKLEESGGGLVQPGGSMKLSCAASGFTFSDAWMDWVRQSPEKGLEWVAEIRSKASNHATYYAESVKGRFTISRDDSKSSVYLQMNSLRAEDTGIYYCTRWRRFFDSWGQGTTLTVSS

SEQ ID NO: 660 - protein, 121 aa, Artificial Sequence
  Synthetic Construct
QVQLVQSGAEVKKPGASVKVSCKASGYTFTEFGMNWVRQAPGQGLEWMGWINTKTGEATYVEEFKGRVTFTTDTSTSTAYMELRSLRSDDTAVYYCARWDFAYYVEAMDYWGQGTTVTVSS

SEQ ID NO: 661 - protein, 123 aa, Artificial Sequence
  Synthetic Construct
QVQLVQSGAEVKKPGSSVKVSCKASGGTFSSYAISWVRQAPGQGLEWMGGIIPIFDTANYAQKFQGRVTITADESTSTAYMELSSLRSEDTAVYYCARPGLAAAYDTGSLDYWGQGTLVTVSS

SEQ ID NO: 662 - protein, 119 aa, Artificial Sequence
  Synthetic Construct
QVQLKQSGPGLVQPSQSLSITCTVSGFSLTNYGVHWVRQSPGKGLEWLGVIWSGGNTDYNTPFTSRLSINKDNSKSQVFFKMNSLQSNDTAIYYCARALTYYDYEFAYWGQGTLVTVSA

SEQ ID NO: 663 - protein, 122 aa, Artificial Sequence
  Synthetic Construct
HHHHHHEVQLVQSGPGLVQPGGSVRISCAASGYTFTNYGMNWVKQAPGKGLEWMGWINTYTGESTYADSFKGRFTFSLDTSASAAYLQINSLRAEDTAVYYCARFAIKGDYWGQGTLLTVSS

SEQ ID NO: 664 - protein, 130 aa, Artificial Sequence
  Synthetic Construct
EVQLVQSGAEVKKPGSSVKVSCKASGGTFSSYAISWVRQAPGQGLEWMGGIIPIFGTANYAQKFQGRVTITADKSTSTAYMELSSLRSEDTAVYYCARAPLRFLEWSTQDHYYYYYMDVWGKGTTVTVSS

SEQ ID NO: 665 - protein, 120 aa, Artificial Sequence
  Synthetic Construct
EVQLVESGGGLVQPGGSLRLSCAASGFSLSNYYVTWVRQAPGKGLEWVGIIYGSDETAYATSAIGRFTISRDNSKNTLYLQMNSLRAEDTAVYYCARDDSSDWDAKFNLWGQGTLVTVSS

SEQ ID NO: 666 - protein, 119 aa, Artificial Sequence
  Synthetic Construct
QVQLQQSGAEVKKPGASVKVSCEASGYTFPSYVLHWVKQAPGQGLEWIGYINPYNDGTQYNEKFKGKATLTRDTSINTAYMELSRLRSDDTAVYYCARGFGGSYGFAYWGQGTLVTVSS

SEQ ID NO: 667 - protein, 115 aa, Artificial Sequence
  Synthetic Construct
QVQLVQSGAEVKKPGASVKVSCKASGYTFTDYEMHWVRQAPGQGLEWMGALDPKTGDTAYSQKFKGRVTLTADKSTSTAYMELSSLTSEDTAVYYCTRFYSYTYWGQGTLVTVSS

SEQ ID NO: 668 - protein, 119 aa, Artificial Sequence
  Synthetic Construct
QVQLVQSGPEVKKPGASVKVSCKASGYTFTDYAVHWVRQAPGKRLEWIGVISTYNDYTYNNQDFKGRVTMTRDTSASTAYMELSRLRSEDTAVYYCARGNSYFYALDYWGQGTSVTVSS

SEQ ID NO: 669 - protein, 120 aa, Artificial Sequence
  Synthetic Construct
QVQLVQPGAEVVKPGASVKLSCKTSGYTFTSNWMHWVKQAPGQGLEWIGEIDPSDSYTNYNQNFQGKAKLTVDKSTSTAYMEVSSLRSDDTAVYYCARGSNPYYYAMDYWGQGTSVTVSS

SEQ ID NO: 670 - protein, 122 aa, Artificial Sequence
  Synthetic Construct
QVQLQESGPGLVKPSQTLSLTCTVSGGSISSGDYFWSWIRQLPGKGLEWIGHIHNSGTTYYNPSLKSRVTISVDTSKKQFSLRLSSVTAADTAVYYCARDRGGDYYYGMDVWGQGTTVTVSS

SEQ ID NO: 671 - protein, 121 aa, Artificial Sequence [sequence omitted]

SEQ ID NO: 672 - protein, 122 aa, Artificial Sequence
  Synthetic Construct
DVKLLESGGGLVQPGGSLKLSCAASGFSLSTSGVGVGWFRQPSGKGLEWLALIWWDDDKYYNPSLKSQLSISKDFSRNQVFLKISNVDIADTATYYCARRDPFGYDNAMGYWGQGTSVTVSS

SEQ ID NO: 673 - protein, 112 aa, Artificial Sequence
  Synthetic Construct
EVQLVESGGGLVQPGGSLRLSCAASGFTFSSYGMSWVRQAPGKGLELVASINSNGGSTYYPDSVKGRFTISRDNAKNSLYLQMNSLRAEDTAVYYCASGDYWGQGTTVTVSS

SEQ ID NO: 674 - protein, 122 aa, Artificial Sequence
  Synthetic Construct
QVQLVQSGAEVKKPGASVKVSCKVSGYIFTSYDINWVRQAPGKGLEWMGWIYPGDGSIKYNEKFKGRVTMTVDKSTDTAYMELSSLRSEDTAVYYCARRGEYGNYEGAMDYWGQGTLVTVSS

SEQ ID NO: 675 - protein, 128 aa, Artificial Sequence
  Synthetic Construct
EVQLVESGGGLVQPGGSLRLSCAASGFTFSNYLMNWVRQAPGKGLEWLANIQEDGIEKYYVDSVKGRFTISRDNAKNSLYLQMNSLRAEDTAVYYCAREPSHYDILTGYDYYYGMDVWGQGTTVTVSS

SEQ ID NO: 676 - protein, 122 aa, Artificial Sequence
  Synthetic Construct
EVQLVESGGGLVQPGGSLRLSCAASGFTFSVYYMNWVRQAPGKGLEWVSDINNEGGTTYYADSVKGRFTISRDNSKNSLYLQMNSLRAEDTAVYYCARDAGYSNHVPIFDSWGQGTLVTVSS

SEQ ID NO: 677 - protein, 114 aa, Artificial Sequence [sequence omitted]

SEQ ID NO: 678 - protein, 117 aa, Artificial Sequence
  Synthetic Construct
QVQLQQSGPGLVKPSQTLSLTCTVSGWSISGGWLWNWIRQPPGKGLQWIGWISWDGTNNWKPSLKDRVTISVDTSKNQFSLKLSSVTAADTAVWWCARWGRVFFDWWGQGTLVTVSS

SEQ ID NO: 679 - protein, 118 aa, Artificial Sequence
  Synthetic Construct
EVQLVESGGGLVQPGGSLRLSCAVSGFSSTNYHVHWVRQAPGKGLEWMGVIWGDGDTSYNSVLKSRFTISRDTSKNTVYLQMNSLRAEDTAVYYCARQLTHYYVLAAWGQGTLVTVSS

SEQ ID NO: 680 - protein, 122 aa, Artificial Sequence [sequence omitted]

SEQ ID NO: 681 - protein, 120 aa, Artificial Sequence
  Synthetic Construct
EVQLVESGGGVVQPGRSLRLSCAASGFTFSSYGMHWVRQAPGKGLEWVAIIWYDGSNKYYADSVKGRFTISRDNSKNTLYLQMNSLRAEDTAVYYCARLWFGDLDAFDIWGQGTMVTVSS

SEQ ID NO: 682 - protein, 119 aa, Artificial Sequence
  Synthetic Construct
QVQLVQSGAEVKKPGASVKISCKASGYSFTAYYIHWVKQAPGQGLEWIGYISSYNGATNYNQKFKGRVTFTTDTSTSTAYMELRSLRSDDTAVYYCARDYDYDVGMDYWGQGTLVTVSS

SEQ ID NO: 683 - protein, 120 aa, Artificial Sequence
  Synthetic Construct
QVQLQESGPGLVKPSQTLSLTCTVSGGSISTSGMGVGWIRQHPGKGLEWIGHIWWDDDKRYNPALKSRVTISVDTSKNQFSLKLSSVTAADTAVYYCARMELWSYYFDYWGQGTLVTVSS

SEQ ID NO: 684 - protein, 122 aa, Artificial Sequence
  Synthetic Construct
EVQLLESGGGLVQPGGSLRLSCAASGFTFSSYAMSWVRQAPGKGLEWVSGITGSGGSTYYADSVKGRFTISRDNSKNTLYLQMNSLRAEDTAVYYCAKDPGTTVIMSWFDPWGQGTLVTVSS

SEQ ID NO: 685 - protein, 116 aa, Artificial Sequence
  Synthetic Construct
QVQLQESGPGLVKPSQTLSLTCTVSGYSISSDFAWNWIRQPPGKGLEWMGYISYSGNTRYQPSLKSRITISRDTSKNQFFLKLNSVTAADTATYYCVTAGRGFPYWGQGTLVTVSS

SEQ ID NO: 686 - protein, 120 aa, Artificial Sequence
  Synthetic Construct
QVQLKESGPGLVAPSQSLSITCTVSGFSLTDYGVRWIRQPPGKGLEWLGVIWGGGSTYYNSALKSRLSISKDNSKSQVFLKMNSLQTDDTAMYYCAKEKRRGYYYAMDYWGQGTSVTVSS

SEQ ID NO: 687 - protein, 122 aa, Artificial Sequence
  Synthetic Construct
QVQLVQSGAEVKKPGSSVKVSCKASGFTFATYNMHWVRQAPGQGLEWMGYIYPGDGNANYNQQFKGRVTITADKSTSTAYMELSSLRSEDTAVYYCARGDFDYDGGYYFDSWGQGTLVTVSS

SEQ ID NO: 688 - protein, 113 aa, Artificial Sequence [sequence omitted]

SEQ ID NO: 689 - protein, 121 aa, Artificial Sequence [sequence omitted]

SEQ ID NO: 690 - protein, 116 aa, Artificial Sequence
  Synthetic Construct
EVQLLESGGGLVQPGGSLRLSCAASGFTFSSYAMSWVRQAPGKGLEWVSTISSGGSYTSYPDSVKGRFTISRDNSKNTLYLQMNSLRAEDTAVYYCAKQDYAMNYWGQGTLVTVSS

SEQ ID NO: 691 - protein, 121 aa, Artificial Sequence [sequence omitted]

SEQ ID NO: 692 - protein, 121 aa, Artificial Sequence [sequence omitted]

SEQ ID NO: 693 - protein, 120 aa, Artificial Sequence
  Synthetic Construct
QVQLVQSGAEVKKPGASVKVSCKASGYTFTSYDINWVRQATGQGLEWMGWMNPNSGNTGYAQKFQGRVTMTRNTSISTAYMELSSLRSEDTAVYYCARDPYYYYYGMDVWGQGTTVTVSS

SEQ ID NO: 694 - protein, 125 aa, Artificial Sequence
  Synthetic Construct
EVQLVESGGGLVQPGGSLRLSCAASGFTFSTYAMNWVRQAPGKGLEWVGRIRSKYNNYATYYADSVKGRFTISRDDSKNSLYLQMNSLKTEDTAVYYCVRHGNFGNSYVSWFAYWGQGTLVTVSS

SEQ ID NO: 695 - protein, 120 aa, Artificial Sequence
  Synthetic Construct
QVTLRESGPALVKPTQTLTLTCTFSGFSLSTSGMGVGWIRQPPGKALEWLAHIWWDDDKRYNPALKSRLTISKDTSKNQVFLTMTNMDPVDTATYYCARMELWSYYFDYWGQGTTVTVSS

SEQ ID NO: 696 - protein, 125 aa, Artificial Sequence
  Synthetic Construct
EVQLVESGGGLVQPGGSLRLSCAASGYSFTGHWMNWVRQAPGKGLEWVGIMIHPSDSETRYNQKFKDIRFTISVDKSKNTLYLQMNSLRAEDTAVYYCARIGIYFYGTTYFDYIWGQGTLVTVSS

SEQ ID NO: 697 - protein, 124 aa, Artificial Sequence
  Synthetic Construct
QMQLVESGGGVVQPGRSLRLSCTASGFTFSNNGMHWVRQAPGKGLEWVAVIWFDGMNKFYVDSVKGRFTISRDNSKNTLYLEMNSLRAEDTAIYYCAREGDGSGIYYYYGMDVWGQGTTVTVSS

SEQ ID NO: 698 - protein, 120 aa, Artificial Sequence
  Synthetic Construct
EVQLVQSGAEVKKPGASVKVSCKASGYTFTSHGISWVRQAPGQGLDWMGWISPYSGNTNYAQKLQGRVTMTTDTSTSTAYMELSSLRSEDTAVYYCARVGSGPYYYMDVWGQGTLVTVSS

SEQ ID NO: 699 - protein, 117 aa, Artificial Sequence
  Synthetic Construct
EVQLLESGGGLVQPGGSLRLSCAASGFTFSSYAMSWVRQAPGKGLEWVSAINSQGKSTYYADSVKGRFTISRDNSKNTLYLQMNSLRAEDTAVYYCARWGDEGFDIWGQGTLVTVSS

SEQ ID NO: 700 - protein, 119 aa, Artificial Sequence
  Synthetic Construct
EVQLVESGGGLVQPGGSLRLSCAASGFDFSRYWMSWVRQAPGKGLEWIGEINPDSSTINYAPSLKDKFIISRDNAKNSLYLQMNSLRAEDTAVYYCARPDGNYWYFDVWGQGTLVTVSS

SEQ ID NO: 701 - protein, 116 aa, Artificial Sequence
  Synthetic Construct
QVQLVQSGAEVKKPGASVKVSCKASGYTFTSYDISWVRQAPGQGLEWMGVIWTDGGTNYAQKLQGRVTMTTDTSTSTAYMELRSLRSDDTAVYYCARDQRLYFDVWGQGTTVTVSS

SEQ ID NO: 702 - protein, 123 aa, Artificial Sequence
  Synthetic Construct
EVQLLESGGGLVQPGGSLRLSCAASGFTFSSYAMSWVRQAPGKGLEWVSAISGSGGSTYYADSVKGRFTISRDNSKNTLYLQMNSLRAEDTAVYYCAKDGSSGWYVPHWFDPWGQGTLVTVSS

SEQ ID NO: 703 - protein, 115 aa, Artificial Sequence [sequence omitted]

SEQ ID NO: 704 - protein, 154 aa, Artificial Sequence
  Synthetic Construct
QVQLVESGGGLVQPGGSLRLSCAASGFTFSYYDIQWVRQAPGKGLEWVSSISPSGQSTYYRREVKGRFTISRDNSKNTLYLQMNSLRAEDTAVYYCARRTGREYGGGWYFDYWGQGTLVTVSSLKTEDEADYYCQSYDGSNRWMFGGGTKLTVL

SEQ ID NO: 705 - protein, 119 aa, Artificial Sequence
  Synthetic Construct
QVQLVQSGSELKKPGASVKVSCKASGYTFTDNNMDWVRQAPGQGLEWMGDINTRSGGSIYNEEFQDRVIMTVDKSTDTAYMELSSLRSEDTATYHCARRKSYGYYLDEWGEGTLVTVSS

SEQ ID NO: 706 - protein, 116 aa, Artificial Sequence
  Synthetic Construct
EVQLLESGGGLVQPGGSLRLSCAASGFTFSSYAMNWVRQAPGKGLEWVSTTSGSGASTYYADSVKGRFTISRDNSKNTLYLQMNSLRAEDTAVYYCAKIWIAFDIWGQGTMVTVSS

SEQ ID NO: 707 - protein, 119 aa, Artificial Sequence
  Synthetic Construct
EVQLVESGGGLVQPGGSLRLSCAASGFTFSSYWMSWVRQAPGKGLEWVAEIRLKSDNYATHYAESVKGRFTISRDDSKNSLYLQMNSLRAEDTAVYYCTGYYADAMDYWGQGTLVTVSS

SEQ ID NO: 708 - protein, 117 aa, Artificial Sequence
  Synthetic Construct
EVQLVESGGGLVQPGGSLRLSCAASGFTFSSYNMNWVRQAPGKGLEWVSYISSSSSTIYYADSVKGRFTISRDNAKNSLSLQMNSLRDEDTAVYYCARAYYYGMDVWGQGTTVTVSS

SEQ ID NO: 709 - protein, 122 aa, Artificial Sequence
  Synthetic Construct
QVQLVQSGAEVKKPGSSVKVSCKASGGTFSYYWIEWVRQAPGQGLEWMGEILPGSGTTNPNEKFKGRVTITADESTSTAYMELSSLRSEDTAVYYCARADYYGSDYVKFDYWGQGTLVTVSS

SEQ ID NO: 710 - protein, 123 aa, Artificial Sequence
  Synthetic Construct
QVQLVESGGGVVQPGRSLRLSCAASGFTFSSYGMHWVRQAPGKGLEWVSFLWYDGTNKNYVESVKGRFTISRDNSKNMLYLEMNSLRAEDTAVYYCARDHDFRSGYEGWFDPWGQGTLVTVSS

SEQ ID NO: 711 - protein, 113 aa, Artificial Sequence
  Synthetic Construct
QVQLKESGPDLVAPSQSLSITCTVSGFSLSKFGVNWVRQPPGKGLEWLGVIWGDGSTSYNSGLISRLSISKENSKSQVFLKLNSLQADDTATYYCVKPGGDYWGHGTSVTVSS

SEQ ID NO: 712 - protein, 116 aa, Artificial Sequence [sequence omitted]

SEQ ID NO: 713 - protein, 111 aa, Artificial Sequence
  Synthetic Construct
EVQLVESGGGLVQPGGSLRLSCAVSGIDLSGYYMNWVRQAPGKGLEWVGVIGINGATYYASWAKGRFTISRDNSKTTVYLQMNSLRAEDTAVYFCARGDIWGQGTLVTVSS

SEQ ID NO: 714 - protein, 117 aa, Artificial Sequence
  Synthetic Construct
QVQLVESGGGVVQPGRSLRLSCAASGFTFSSYDMSWVRQAPGKGLEWVAKVSSGGGSTYYLDTVQGRFTISRDNSKNTLYLQMNSLRAEDTAVYYCARHLHGSFASWGQGTTVTVSS

SEQ ID NO: 715 - protein, 118 aa, Artificial Sequence
  Synthetic Construct
QVQLQESGPGLVKPSETLSLTCAVSGYSITSDYAWNWIRQPPGKGLEWIGYISYSGSTSYNPSLRSRVTISRDTSKNQFFLKLSSVTAADTAVYYCARRQVGLGFAYWGQGTLVTVSS

SEQ ID NO: 716 - protein, 117 aa, Artificial Sequence [sequence omitted]

SEQ ID NO: 717 - protein, 115 aa, Artificial Sequence [sequence omitted]

SEQ ID NO: 718 - protein, 119 aa, Artificial Sequence
  Synthetic Construct
EVQLVESGGGVVQPGRSLRLSCSASGFTFSGYGLSWVRQAPGKGLEWVAMISSGGSYTYYADSVKGRFAISRDNAKNTLFLQMDSLRPEDTGVYFCARHGDDPAWFAYWGQGTPVTVSS

SEQ ID NO: 719 - protein, 121 aa, Artificial Sequence
  Synthetic Construct
QVQLVQSGAEVKKPGASVKVSCKASGYTFTNYYMHWVRQAPGQGLEWVGWINPYTGSAFYAQKFRGRVTMTRDTSISTAYMELSRLRSDDTAVYYCAREPEKFDSDDSDVWGRGTLVTVSS

SEQ ID NO: 720 - protein, 118 aa, Artificial Sequence
  Synthetic Construct
QVQLVQPGAEVKKPGTSVKLSCKASGYTFTTYWMHWVRQAPGQGLEWIGEINPTNGHTNYNQKFQGRATLTVDKSTSTAYMELSSLRSEDTAVYYCARNYVGSIFDYWGQGTLLTVSS

SEQ ID NO: 721 - protein, 125 aa, Artificial Sequence [sequence omitted]

SEQ ID NO: 722 - protein, 123 aa, Artificial Sequence
  Synthetic Construct
QVQLVQSGAEVKMPGSSVKVSCKTSGVFFSSHAISWVRQAPGQGLEWMGGISPMFGTTHYAQKFQGRVTITADQSTTTAYMELTSLTSEDTAVYYCARDGAGSYYPLNWFDPWGQGTLVTVSS

SEQ ID NO: 723 - protein, 119 aa, Artificial Sequence
  Synthetic Construct
QVQLVQSGSELKKPGASVKISCKASGYTFTSYAMNWVRQAPGQGLESMGWINTNTGNPTYAQGFTGRFVFSMDTSVSTAYLQISSLKAEDTAIYYCAPRYSSSWYLDYWGQGTLVTVSS

SEQ ID NO: 724 - protein, 127 aa, Artificial Sequence [sequence omitted]

SEQ ID NO: 725 - protein, 118 aa, Artificial Sequence [sequence omitted]

SEQ ID NO: 726 - protein, 119 aa, Artificial Sequence
  Synthetic Construct
QVQLVESGGGAVQPGRSLRLSCAASGFTFSSYGMHWVRQAPGKGLEWVAVILYDGSDKFYADSVKGRFTISRDNSKNTLYLQMNSLRAEDTAVYYCAKVAVAGTHFDYWGQGTLVTVSS

SEQ ID NO: 727 - protein, 123 aa, Artificial Sequence
  Synthetic Construct
EVQLVESGGGLVQPGGSLRLSCAASGFTLRSYSMNWVRQAPGKGLEWVSYISRSSHTIFYADSVKGRFTISRDNAKNSLYLQMDSLRDEDTAMYYCARVYSSGWHVSDYFDYWGQGILVTVSS

SEQ ID NO: 728 - protein, 123 aa, Artificial Sequence
  Synthetic Construct
EVQLQQPGSELVRPGASVKLSCKASGYTFTSYWMHWVKQRPGQGLEWIGNIYPGSRSTNYDEKFKSKATLTVDTSSSTAYMQLSSLTSEDSAVYYCTRNGDYYVSSGDAMDYWGQGTSVTVSS

SEQ ID NO: 729 - protein, 119 aa, Artificial Sequence
  Synthetic Construct
QVQLVQSGAEVKKPGSSVKVSCKASGYTFGNYWMQWVRQAPGQGLEWMGAIYEGTGKTVYIQKFADRVTITADKSTSTAYMELSSLRSEDTAVYYCARLSDYVSGFGYWGQGTTVTVSS

SEQ ID NO: 730 - protein, 127 aa, Artificial Sequence [sequence omitted]

SEQ ID NO: 731 - protein, 119 aa, Artificial Sequence [sequence omitted]

SEQ ID NO: 732 - protein, 126 aa, Artificial Sequence [sequence omitted]

SEQ ID NO: 733 - protein, 116 aa, Artificial Sequence [sequence omitted]

SEQ ID NO: 734 - protein, 120 aa, Artificial Sequence [sequence omitted]

SEQ ID NO: 735 - protein, 119 aa, Artificial Sequence
  Synthetic Construct
DVKLVESGGGLVKLGGSLKLSCAASGFTFSNYYMSWVRQTPEKRLELVAAINSDGGITYYLDTVKGRFTISRDNAKNTLYLQMSSLKSEDTALFYCARHRSGYFSMDYWGQGTSVTVSS

SEQ ID NO: 736 - protein, 119 aa, Artificial Sequence [sequence omitted]

SEQ ID NO: 737 - protein, 122 aa, Artificial Sequence
  Synthetic Construct
QVQLQQSGPEVVKPGASVKMSCKASGYTFTSYVIHWVRQKPGQGLDWIGYINPYNDGTDYDEKFKGKATLTSDTSTSTAYMELSSLRSEDTAVYYCAREKDNYATGAWFAYWGQGTLVTVSS

SEQ ID NO: 738 - protein, 126 aa, Artificial Sequence
  Synthetic Construct
QAQVVESGGGVVQSGRSLRLSCAASGFAFSSYGMHWVRQAPGKGLEWVAVIWYDGSNKYYADSVRGRFTISRDNSENTLYLQMNSLRAEDTAVYYCARDHYGSGVHHYFYYGLDVWGQGTTVTVSS

SEQ ID NO: 739 - protein, 122 aa, Artificial Sequence
  Synthetic Construct
QVQLQESGPGLVKPSETLSLTCTVSGFSLTSYIVDWIRQPPGKGLEWIGVIWAGGSTGYNSALRSRVSITKDTSKNQFSLKLSSVTAADTAVYYCASAAYYSYYNYDGFAYWGQGTLVTVSS

SEQ ID NO: 740 - protein, 118 aa, Artificial Sequence
  Synthetic Construct
EVQLLESGGGLVQPGGSLRLSCAASGFTFSIYSMNWVRQAPGKGLEWVSSIGSSGGTTYYADSVKGRFTISRDNSKNTLYLQMNSLRAEDTAVYYCAGSQWLYGMDVWGQGTTVTVSS

SEQ ID NO: 741 - protein, 120 aa, Artificial Sequence [sequence omitted]

SEQ ID NO: 742 - protein, 124 aa, Artificial Sequence
  Synthetic Construct
EVQLVESGGGLVRPGGSLRLSCAASGFTFSNYDMHWVRQATGKGLEWVSAITAAGDIYYPGSVKGRFTISRENAKNSLYLQMNSLRAGDTAVYYCARGRYSGSGSYYNDWFDPWGQGTLVTVSS

SEQ ID NO: 743 - protein, 122 aa, Artificial Sequence
  Synthetic Construct
QVQLQQSGSELMMPGASVKISCKATGYTFSNYWIEWVKQRPGHGLEWIGEILPGTGRTIYNEKFKGKATFTADISSNTVQMQLSSLTSEDSAVYYCARRDYYGNFYYAMDYWGQGTSVTVSS

SEQ ID NO: 744 - protein, 119 aa, Artificial Sequence
  Synthetic Construct
QVQLQQWGAGLLKPSETLSLTCAVFGGSFSGYYWSWIRQPPGKGLEWIGEINHRGNTNDNPSLKSRVTISVDTSKNQFALKLSSVTAADTAVYYCARERGYTYGNFDHWGQGTLVTVSS

SEQ ID NO: 745 - protein, 119 aa, Artificial Sequence
  Synthetic Construct
QVQLVESGGGVVQPGRSRRLSCAASGFTFSRYTMHWVRQAPGKGLEWVAVISFDGSNKYYVDSVKGRFTISRDNSENTLYLQVNILRAEDTAVYYCAREARGSYAFDIWGQGTMVTVSS

SEQ ID NO: 746 - protein, 121 aa, Artificial Sequence
  Synthetic Construct
EVQLVQSGAEVKKPGASVKVSCKASGYRFTNYWIHWVRQAPGQGLEWIGGINPGNNYATYRRKFQGRVTMTADTSTSTVYMELSSLRSEDTAVYYCTREGYGNYGAWFAYWGQGTLVTVSS

SEQ ID NO: 747 - protein, 119 aa, Artificial Sequence
  Synthetic Construct
EVQLVESGGGLVKPGGSLKLSCAASGFKFSRYAMSWVRQAPGKRLEWVATISSGGSYIYYPDSVKGRFTISRDNVKNTLYLQMSSLRSEDTAMYYCARRDYDLDYFDSWGQGTLVTVSS

SEQ ID NO: 748 - protein, 119 aa, Artificial Sequence
  Synthetic Construct
EVQLVESGGGVVQPGRSLRLSCSASGFDFTTYWMSWVRQAPGKGLEWIGEIHPDSSTINYAPSLKDRFTISRDNAKNTLFLQMDSLRPEDTGVYFCASLYFGFPWFAYWGQGTPVTVSS

SEQ ID NO: 749 - protein, 115 aa, Artificial Sequence [sequence omitted]

SEQ ID NO: 750 - protein, 113 aa, Artificial Sequence
  Synthetic Construct
EVQLVESGGGLVQPGGSLRLSCAASGLTFSRYPMSWVRQAPGKGLVWVSAITSSGGSTYYSDTVKGRFTISRDNAKNTLYLQMNSLRAEDTAVYYCARLPDYWGQGTLVTVSS

SEQ ID NO: 751 - protein, 118 aa, Artificial Sequence [sequence omitted]

SEQ ID NO: 752 - protein, 119 aa, Artificial Sequence [sequence omitted]

SEQ ID NO: 753 - protein, 120 aa, Artificial Sequence
  Synthetic Construct
EVQLVESGGGLVQPGGSLRLSCAASGFSFSDFAMSWVRQAPGKGLEWVATIGRVAFHTYYPDSMKGRFTISRDNSKNTLYLQMNSLRAEDTAVYYCARHRGFDVGHFDFWGQGTLVTVSS

SEQ ID NO: 754 - protein, 119 aa, Artificial Sequence
  Synthetic Construct
EIQLQQSGPELVKPGASVKVSCKASGYSFTDYNMYWVKQSHGKSLEWIGYIDPYNGDTTYNQKFKGKATLTVDKSSSTAFIHLNSLTSEDSAVYYCARSPYGHYAMDYWGQGTSVTVSS

SEQ ID NO: 755 - protein, 116 aa, Artificial Sequence
  Synthetic Construct
QVQLVQSGAEVKKPGSSVKVSCKASGYTFTDYNMHWVRQAPGQGLEWIGYIYPYNGGTGYNQKFKSKATITADESTNTAYMELSSLRSEDTAVYYCARGRPAMDYWGQGTLVTVSS

SEQ ID NO: 756 - protein, 123 aa, Artificial Sequence
  Synthetic Construct
QVQLVQSGAEVKKPGSSVKVSCKASGGTFSFYAISWVRQAPGQGLEWMGGFIPIFGAANYAQKFQGRVTITADESTSTAYMELSSLRSDDTAVYYCARIPSGSYYYDYDMDVWGQGTTVTVSS

SEQ ID NO: 757 - protein, 118 aa, Artificial Sequence
  Synthetic Construct
QVQLVQSGAEVKKPGASVKVSCKASGYTFSTMYMSWVRQAPGQGLEWMGRIDPANEHTNYAQKFQGRVTMTRDTSISTAYMELSRLTSDDTAVYYCARSYYYYNMDYWGQGTLVTVSS

SEQ ID NO: 758 - protein, 118 aa, Artificial Sequence
  Synthetic Construct
EVQLVESGGDLVKPGGSLRLSCVASGFTFSNYGMSWVRQAPGKGLQWVATISYGGSYTYYPDNIKGRFTISRDNAKNTLYLQMNSLRAEDTAMYYCVRGYGYDTMDYWGQGTLVTVSS

SEQ ID NO: 759 - protein, 118 aa, Artificial Sequence
  Synthetic Construct
QVQLVESGGGVVQPGRSLRLSCAASGFTFSSFGMHWVRQAPGKGLEWVAYISSGSFTIYYADSVKGRFTISRDNSKNTLYLQMNSLRAEDTAVYYCARMRKGYAMDYWGQGTLVTVSS

SEQ ID NO: 760 - protein, 118 aa, Artificial Sequence
  Synthetic Construct
EVQLVESGGGLAKPGGSLRLSCAASGFRFTFNNYYMDWVRQAPGQGLEWVSRISSSGDPTWYADSVKGRFTISRENANNTLFLQMNSLRAEDTAVYYCASLTTGSDSWGQGVLVTVSS

SEQ ID NO: 761 - protein, 120 aa, Artificial Sequence
  Synthetic Construct
QVQLVQSGAEVKKPGASVKVSCKASGYTFRSSYISWVRQAPGQGLEWMGWIYAGTGSPSYNQKLQGRVTMTTDTSTSTAYMELRSLRSDDTAVYYCARHRDYYSNSLTYWGQGTLVTVSS

SEQ ID NO: 762 - protein, 120 aa, Artificial Sequence
  Synthetic Construct
QVQLQQSGPELVKPGASLKLSCTASGFNIKDTYIHWVKQRPEQGLEWIGRIYPTNGYTRYDPKFQDKATITADTSSNTAYLQVSRLTSEDTAVYYCSRWGGDGFYAMDYWGQGASVTVSS

SEQ ID NO: 763 - protein, 121 aa, Artificial Sequence [sequence omitted]

SEQ ID NO: 764 - protein, 119 aa, Artificial Sequence [sequence omitted]

SEQ ID NO: 765 - protein, 120 aa, Artificial Sequence
  Synthetic Construct
QVQLQQSGSELKKPGASVKVSCKASGYTFTNYGVNWIKQAPGQGLQWMGWINPNTGEPTFDDDFKGRFAFSLDTSVSTAYLQISSLKADDTAVYFCSRSRGKNEAWFAYWGQGTLVTVSS

SEQ ID NO: 766 - protein, 118 aa, Artificial Sequence
  Synthetic Construct
QVQLVQSGAEVVKPGASVKISCKASGYTFTGYFMNWVKQSPGQSLEWIGRIHPYDGDTFYNQKFQGKATLTVDKSSNTAHMELLSLTSEDFAVYYCTRYDGSRAMDYWGQGTTVTVSS

SEQ ID NO: 767 - protein, 119 aa, Artificial Sequence
  Synthetic Construct
QVQLQQPGAELVEPGGSVKLSCKASGYTFTSHWMHWVKQRPGQGLEWIGEINPSSGRNNYNEKFKSKATLTVDKSSSTAYMQFSSLTSEDSAVYYCVRYYGYDEAMDYWGQGTSVTVSS

SEQ ID NO: 768 - protein, 119 aa, Artificial Sequence
  Synthetic Construct
EVQLVESGGDLVQPGRSLRLSCAASGFIFSNYGMSWVRQAPGKGLEWVATISSASTYSYYPDSVKGRFTISRDNAKNSLYLQMNSLRVEDTALYYCGRHSDGNFAFGYWGQGTLVTVSS

SEQ ID NO: 769 - protein, 125 aa, Artificial Sequence
  Synthetic Construct
QVQLVQSGAEVKKPGASVKVSCKASGYTFTSYWMNWVRQAPGQGLEWMGRIDPYDSETHYAQKLQGRVTMTTDTSTSTAYMELRSLRSDDTAVYYCARGGYDFDVGTLYWFFDVWGQGTTVTVSS

SEQ ID NO: 770 - protein, 120 aa, Artificial Sequence [sequence omitted]

SEQ ID NO: 771 - protein, 119 aa, Artificial Sequence [sequence omitted]

SEQ ID NO: 772 - protein, 119 aa, Artificial Sequence
  Synthetic Construct
QVQLVQSGAEVKKPGASVKVSCKAFGYPFTDYLLHWVRQAPGQGLEWVGWLNPYSGDTNYAQKFQGRVTMTRDTSISTAYMELSRLRSDDTAVYYCTRTTLISVYFDYWGQGTMVTVSS

SEQ ID NO: 773 - protein, 122 aa, Artificial Sequence
  Synthetic Construct
EVQLVESGGGLVQPGGSLRLSCAASGFTFSSYLMTWVRQAPGKGLEWVANIKQDGSEKYYVDSVKGRFTISRDNAKNSLNLQMNSLRAEDTAVYYCTRDGYSSGRHYGMDVWGQGTTVIVSS

SEQ ID NO: 774 - protein, 126 aa, Artificial Sequence [sequence omitted]

SEQ ID NO: 775 - protein, 121 aa, Artificial Sequence [sequence omitted]

SEQ ID NO: 776 - protein, 121 aa, Artificial Sequence
  Synthetic Construct
QVQLVQSGAEVKKPGASVKVSCKASGYTFTGYIMNWVRQAPGQGLEWMGLINPYNGGTDYNPQFQDRVTITADKSTSTAYMELSSLRSEDTAVYYCARDGYDDGPYTLETWGQGTLVTVSS

SEQ ID NO: 777 - protein, 122 aa, Artificial Sequence
  Synthetic Construct
EVQLVESGGGLVQPGGSLRLSCAASGFTFSSYDIHWVRQATGKGLEWVSAIGPAGDTYYPGSVKGRFTISRENAKNSLYLQMNSLRAGDTAVYYCARGLITFGGLIAPFDYWGQGTLVTVSS

SEQ ID NO: 778 - protein, 119 aa, Artificial Sequence
  Synthetic Construct
QVQLQQSGPELKKPGASVKVSCKDSGYAFSSSWMNWVRQAPGQGLEWIGRIYPGDGDTNYNGKFQGRVTITADKSSSTAYMELSSLRSEDTAVYFCARSGLLRYAMDYWGQGTLVTVSS

SEQ ID NO: 779 - protein, 119 aa, Artificial Sequence
  Synthetic Construct
QVQLVQSGAEVKKPGSSVKVSCKASGYAFSYSWINWVRQAPGQGLEWMGRIFPGDGDTDYNGKFKGRVTITADKSTSTAYMELSSLRSEDTAVYYCARNVFDGYWLVYWGQGTLVTVSS

SEQ ID NO: 780 - protein, 121 aa, Artificial Sequence
  Synthetic Construct
EVQLVQSGAEVKKPGESLKISCKGSGRTFTSYNMHWVRQMPGKGLEWMGAIYPLTGDTSYNQKSKLQVTISADKSISTAYLQWSSLKASDTAMYYCARSTYVGGDWQFDVWGKGTTVTVSS

SEQ ID NO: 781 - protein, 127 aa, Artificial Sequence
  Synthetic Construct
QLQLQESGPGLVKPSETLSLTCTVSGGSINSSSYYWGWLRQSPGKGLEWIGSFFYTGSTYYNPSLRSRLTISVDTSKNQFSLMLSSVTAADTAVYYCARQSTYYYGSGNYYGWFDRWDQGTLVTVSS

SEQ ID NO: 782 - protein, 120 aa, Artificial Sequence [sequence omitted]

SEQ ID NO: 783 - protein, 119 aa, Artificial Sequence [sequence omitted]

SEQ ID NO: 784 - protein, 121 aa, Artificial Sequence
  Synthetic Construct
EVQLLESGGGLVQPGGSLRLSCAASGFTFSNAWMSWVRQAPGKGLEWVSSISVGGHRTYYADSVKGRSTISRDNSKNTLYLQMNSLRAEDTAVYYCARIRVGPSGGAFDYWGQGTLVTVSS

SEQ ID NO: 785 - protein, 119 aa, Artificial Sequence [sequence omitted]

SEQ ID NO: 786 - protein, 116 aa, Artificial Sequence
  Synthetic Construct
EVQLVQSGAEVKKPGESLKISCKGSGYSFTGYNMNWVRQMPGKGLEWMGNIDPYYGGTTYNRKFKGQVTISADKSISTAYLQWSSLKASDTAMYYCARSVGPFDSWGQGTLVTVSS

SEQ ID NO: 787 - protein, 120 aa, Artificial Sequence
  Synthetic Construct
EVQLLESGGGLVQPGGSLRLSCAASGFTFNSYAMSWVRQAPGKGLEWVSIISGSGGFTYYADSVKGRFTISRDNSRTTLYLQMNSLRAEDTAVYYCAKDRLVAPGTFDYWGQGALVTVSS

SEQ ID NO: 788 - protein, 113 aa, Artificial Sequence [sequence omitted]

SEQ ID NO: 789 - protein, 120 aa, Artificial Sequence
  Synthetic Construct
QVTLRESGPALVKPTQTLTLTCTFSGFSLSTSGMSVGWIRQPPGKALEWLADIWWDDKKDYNPSLKSRLTISKDTSKNQVVLKVTNMDPADTATYYCARSMITNWYFDVWGAGTTVTVSS

SEQ ID NO: 790 - protein, 120 aa, Artificial Sequence
  Synthetic Construct
EGQLVQSGGGLVHPGGSLRLSCAGSGFTFSSYGMHWVRQAPGKGLEWVSGIGTGGGTYSTDSVKGRFTISRDNAKNSLYLQMNSLRAEDMAVYYCARGDYYGSGSFFDCWGQGTLVTVSS

SEQ ID NO: 791 - protein, 119 aa, Artificial Sequence [sequence omitted]

SEQ ID NO: 792 - protein, 116 aa, Artificial Sequence
  Synthetic Construct
EEQVVESGGGFVQPGGSLRLSCAASGFTFSPYWMHWVRQAPGKGLVWVSRINSDGSTYYADSVKGRFTISRDNARNTLYLQMNSLRAEDTAVYYCARDRYYGPEMWGQGTMVTVSS

SEQ ID NO: 793 - protein, 123 aa, Artificial Sequence [sequence omitted]

SEQ ID NO: 794 - protein, 118 aa, Artificial Sequence
  Synthetic Construct
EVQLVESGGGLVQPGGSLRLSCAASGYTFTSYVIHWVRQAPGKGLEWVGYNNPYNAGTNYNEKFKGRFTISSDKSKNTAYLQMNSLRAEDTAVYYCSRPTMLPWFAYWGQGTLVTVSS

SEQ ID NO: 795 - protein, 117 aa, Artificial Sequence [sequence omitted]

SEQ ID NO: 796 - protein, 122 aa, Artificial Sequence
  Synthetic Construct
EVQLVESGGGLVQPGGSLRLSCAASGFTFSDYTMLWVRQAPGKGLEWVAIIKSGGSYSYYPDSVKGRFTISRDNAKNSLYLQMNSLRAEDTAVYYCARDGDYGSSYGAMDYWGQGTLVTVSS

SEQ ID NO: 797 - protein, 119 aa, Artificial Sequence [sequence omitted]

SEQ ID NO: 798 - protein, 117 aa, Artificial Sequence
  Synthetic Construct
QVQLVQSGSELKKPGASVKISCKASGYTFTNYGMNWVRQAPGQGLQWMGWINTDSGESTYAEEFKGRFVFSLDTSVNTAYLQITSLTAEDTGMYFCVRVGYDALDYWGQGTLVTVSS

SEQ ID NO: 799 - protein, 120 aa, Artificial Sequence
  Synthetic Construct
EVQLVESGGGLVQPGGSLRLSCAASGYEFSRSWMNWVRQAPGKGLEWVGRIYPGDGDTNYSGKFKGRFTISADTSKNTAYLQMNSLRAEDTAVYYCARDGSSWDWYFDVWGQGTLVTVSS

SEQ ID NO: 800 - protein, 117 aa, Artificial Sequence
  Synthetic Construct
EVQLVESGGGLVKPGGSLRLSCAASGFTFSAYAMNWVRQAPGKGLEWVGRIRTKNNNYATYYADSVKDRFTISRDDSKNTLYLQMNSLKTEDTAVYYCTTFYGNGVWGQGTLVTVSS

SEQ ID NO: 801 - protein, 117 aa, Artificial Sequence [sequence omitted]

SEQ ID NO: 802 - protein, 116 aa, Artificial Sequence
  Synthetic Construct
QVQLVQSGAEVKKPGASVKVSCKASGYYTEAYYIHWVRQAPGQGLEWMGRIDPATGNTKYAPRLQDRVTMTRDTSTSTVYMELSSLRSEDTAVYYCASLYSLPVYWGQGTTVTVSS

SEQ ID NO: 803 - protein, 122 aa, Artificial Sequence
  Synthetic Construct
QVQLQESGAELVRSGASVRMSCKASGYTFTSYNMHWVKQTPGQGLEWIGYIYPGNGGTNYIQKFKGKAILTADTSSSTAYMQISSLTSEDSAVYFCTRSPSHYSSDPYFDYWGQGTTLTVSS

SEQ ID NO: 804 - protein, 117 aa, Artificial Sequence
  Synthetic Construct
EVQLVESGGGLVQPGGSLRLSCAASGFTFSDYGIAWVRQAPGKGLEWVAFISDLAYTIYYADTVTGRFTISRDNSKNTLYLQMNSLRAEDTAVYYCARDNWDAMDYWGQGTLVTVSS

SEQ ID NO: 805 - protein, 121 aa, Artificial Sequence
  Synthetic Construct
QVQLQQSGAELVKPGASVKLSCKASGYTFTSYDINWVRQRPEQGLEWIGWIFPGDGSTKYNEKFKGKATLTTDKSSSTAYMQLSRLTSEDSAVYFCAREDYYDNSYYFDYWGQGTTLTVSS

SEQ ID NO: 806 - protein, 116 aa, Artificial Sequence [sequence omitted]

SEQ ID NO: 807 - protein, 127 aa, Artificial Sequence
  Synthetic Construct
QVQLVQSGAEVKKPGSSVKVSCKASGGTFNRYTVNWVRQAPGQGLEWMGGIIPIFGTANYAQRFQGRLTITADESTSTAYMELSSLRSDDTAVYFCARENLDNSGTYYYFSGWFDPWGQGTLVTVSS

SEQ ID NO: 808 - protein, 118 aa, Artificial Sequence [sequence omitted]

SEQ ID NO: 809 - protein, 116 aa, Artificial Sequence [sequence omitted]

SEQ ID NO: 810 - protein, 126 aa, Artificial Sequence
  Synthetic Construct
QVQLVQSGSELKKPGASVKVSCKASGYTFTNYGMNWVRQAPGQGLEWMGWINTYTGEPTYADDFTGRFVFSLDTSVSTAYLQISSLKAEDTAVYYCARNPINYYGINYEGYVMDYWGQGTLVTVSS

SEQ ID NO: 811 - protein, 116 aa, Artificial Sequence [sequence omitted]

SEQ ID NO: 812 - protein, 120 aa, Artificial Sequence
  Synthetic Construct
QVQLQESGPGLVKPSETLSLTCTVSGGSISIYYWSWIRQPPGKGLEWIGYVYYSGSTNYNPSLKSRVTISVDTSKNQFSLKLNSVTAADTAVYYCARGGYDFWSGYFDYWGQGTLVTVSS

SEQ ID NO: 813 - protein, 122 aa, Artificial Sequence
  Synthetic Construct
QLQLQESGPGLVKPSETLSLTCTVSGGSITSSSYYWGWIRQPPGKGLEWIGSIYYRGSTNYNPSLKSRVTISVDSSKNQFYLKVSSVTAVDTAVYYCARQNGAARPSWFDPWGQGTLVTVSS

SEQ ID NO: 814 - protein, 124 aa, Artificial Sequence
  Synthetic Construct
EVQLVESGGGVVQPGRSLRLSCAASGFTFSNYPMHWVRQAPGKGLEWVAVISYDGSEKWYADSVKGRFTISRDNSKNTLYLEMNSLRPEDTAVYYCARNRGDIYYDFTYAMDIWGQGTTVTVSS

SEQ ID NO: 815 - protein, 118 aa, Artificial Sequence [sequence omitted]

SEQ ID NO: 816 - protein, 126 aa, Artificial Sequence
  Synthetic Construct
QVQLVESGGGVVQPGRSLRLSCTASGFTFKNYAMHWVRQAPAKGLEWVATISYDGRNIQYADSVKGRFTFSRDNSQDTLYLQLNSLRPEDTAVYYCARPVRSRWLQLGLEDAFHIWGQGTMVTVSS

SEQ ID NO: 817 - protein, 123 aa, Artificial Sequence [sequence omitted]

SEQ ID NO: 818 - protein, 117 aa, Artificial Sequence [sequence omitted]

SEQ ID NO: 819 - protein, 118 aa, Artificial Sequence
  Synthetic Construct
QVQLVQSGAEVKKPGASVKVSCKASGYTFTNYGMNWVRQAPGQGLEWMGWINTYTGEPTYADDFKGRVTMTTDTSTSTAYMELRSLRSDDTAVYYCARIGDSSPSDYWGQGTLVTVSS

SEQ ID NO: 820 - protein, 121 aa, Artificial Sequence
  Synthetic Construct
QVQLQQSGSELKKPGASVKVSCKASGYTFTNYGMNWVKQAPGQGLKWMGWINTYTGEPTYTDDFKGRFAFSLDTSVSTAYLQISSLKADDTAVYFCARGGFGSSYWYFDVWGQGSLVTVSS

SEQ ID NO: 821 - protein, 117 aa, Artificial Sequence
  Synthetic Construct
QVQLQQSGSELKKPGASVKISCKASGYSFTDYIILWVRQNPGKGLEWIGHIDPYYGSSNYNLKFKGRVTITADQSTTTAYMELSSLRSEDTAVYYCGRSKRDYFDYWGQGTTLTVSS

SEQ ID NO: 822 - protein, 114 aa, Artificial Sequence
  Synthetic Construct
QVQLQQSDAELVKPGASVKISCKASGYTFTDHAIHWAKQKPEQGLEWIGYISPGNDDIKYNEKFKGKATLTADKSSSTAYMQLNSLTSEDSAVYFCKRSYYGHWGQGTTLTVSS

SEQ ID NO: 823 - protein, 119 aa, Artificial Sequence [sequence omitted]

SEQ ID NO: 824 - protein, 121 aa, Artificial Sequence
  Synthetic Construct
EVQLQQPGPELEKPGASVKLSCKASGYSFTDYNMNWVKQNNGESLEWIGKIDPYYGGPSYNQKFKDKATLTVDKSSSTAYMQLKSLTSEDSAVYYCTRGGNRDWYFDVWGAGTTLTVSAEF

SEQ ID NO: 825 - protein, 116 aa, Artificial Sequence [sequence omitted]

SEQ ID NO: 826 - protein, 119 aa, Artificial Sequence [sequence omitted]

SEQ ID NO: 827 - protein, 116 aa, Artificial Sequence
  Synthetic Construct
QVQLVQSGAEVKKPGASVKVSCKASGYAFTYYLIEWVRQAPGQGLEWIGVINPGSGGTNYNEKFKGRATITADKSTSTAYMELSSLRSEDTAVYFCARNWMNFDYWGQGTTVTVSS

SEQ ID NO: 828 - protein, 119 aa, Artificial Sequence
  Synthetic Construct
EVQLVESGGGLVQPGGSLRLSCAASGFTFSPFAMSWVRQAPGKGLEWVAKISPGGSWTYYSDTVTGRFTISRDNAKNSLYLQMNSLRAEDTAVYYCARQLWGYYALDIWGQGTTVTVSS

SEQ ID NO: 829 - protein, 116 aa, Artificial Sequence
  Synthetic Construct
EVQLVESGGGLVQPGGSLRLSCAASGYSITNDYAWNWVRQAPGKGLEWVGYISYSGYTTYNPSLKSRFTISRDTSKNTLYLQMNSLRAEDTAVYYCARWTSGLDYWGQGTLVTVSS

SEQ ID NO: 830 - protein, 112 aa, Artificial Sequence
  Synthetic Construct
EVQLVESGGGLVQPGGSLRLSCAASGFTFSRYSMSWVRQAPGKGLELVAQINSVGNSTYYPDTVKGRFTISRDNAKNTLYLQMNSLRAEDTAVYYCASGDYWGQGTLVTVSS

SEQ ID NO: 831 - protein, 118 aa, Artificial Sequence
  Synthetic Construct
QVQLVQSGAEVKKPGASVKVSCKASGYTFTNSWIGWFRQAPGQGLEWIGDIYPGGGYTNYNEIFKGKATMTADTSTNTAYMELSSLRSEDTAVYYCSRGIPGYAMDYWGQGTLVTVSS

SEQ ID NO: 832 - protein, 123 aa, Artificial Sequence [sequence omitted]

SEQ ID NO: 833 - protein, 121 aa, Artificial Sequence [sequence omitted]

SEQ ID NO: 834 - protein, 115 aa, Artificial Sequence
  Synthetic Construct
EVQLVESGGGLVQPGGSLRLSCAASGFTFSSSGMSWVRQAPGKGLEWVSVIASSGSNTYYADSVKGRFTISRDNSKNTLYLQMNSLRAEDTAVYYCARSIFYTTWGQGTLVTVSS

SEQ ID NO: 835 - protein, 120 aa, Artificial Sequence
  Synthetic Construct
EIQLQQSGPELVKPGASVKVSCKASGYAFTSYNMYWVKQSHGKSLEWIGYIDPYNGVTSYNQKFKGKATLTVDKSSSTAYMHLNSLTSEDSAVYYCARGGGSIYYAMDYWGQGTSVTVSS

SEQ ID NO: 836 - protein, 119 aa, Artificial Sequence [sequence omitted]

SEQ ID NO: 837 - protein, 118 aa, Artificial Sequence
  Synthetic Construct
QVELVESGGGVVQPGRSQRLSCAASGFTFSSYGMHWVRQAPGKGLEWVAIIWFDGSSTYYADSVRGRFTISRDNSKNTLYLQMNSLRAEDTAVYFCARELGRRYFDLWGRGTLVSVSS

SEQ ID NO: 838 - protein, 116 aa, Artificial Sequence
  Synthetic Construct
EVQLVQSGAEVKKPGSSVKVSCKASGGTFSSYAISWVRQAPGQGLEWMGGIGPFFGTANYAQKFQGRVTITADESTSTAYMELSSLRSEDTAVYYCARDTPYFDYWGQGTLVTVSS

SEQ ID NO: 839 - protein, 122 aa, Artificial Sequence
  Synthetic Construct
QMQLVESGGGVVQPGRSLRLSCAASGFTFRTYGMHWVRQAPGKGLEWVAVIWYDGSNKHYADSVKGRFTITRDNSKNTLNLQMNSLRAEDTAVYYCARAPQWELVHEAFDIWGQGTMVTVSS

SEQ ID NO: 840 - protein, 119 aa, Artificial Sequence [sequence omitted]

SEQ ID NO: 841 - protein, 117 aa, Artificial Sequence
  Synthetic Construct
QVQLVESGGGVVQPGRSLRLSCAASGFTFFSYAMHWVRQTPGKGLEWVAVIWFDGSNENYVDSVKGRFTISRDNSKNTLYLQMNTLRAEDTAVYYCARDAWSYFDYWGQGTLVTVSS

SEQ ID NO: 842 - protein, 118 aa, Artificial Sequence
  Synthetic Construct
EVQLLESGGGLVQPGGSLRLSCAASGFTFSNYAMSWVRQAPGKGLEWVSSISGSGDYTYYTDSVKGRFTISRDNSKNTLYLQMNSLRAEDTAVYYCARSPWGYYLDSWGQGTLVTVSS

SEQ ID NO: 843 - protein, 121 aa, Artificial Sequence
  Synthetic Construct
EVQMVQSGAEVKKPGEPLKISCKGSGYKFGTHWIGWVRQRPGKGLEWMGIIHPADSETKYSPSFQGQVSFSADKSSNTAYLHWSTLRASDTAMYYCARRSGSSSWYALDFWGQGTMVTVSS

SEQ ID NO: 844 - protein, 120 aa, Artificial Sequence
  Synthetic Construct
QVQLVESGGGLVKPGGSLRLSCAASGFTFSDYYMNWIRQAPGKGLEWVSYISSSGSIIYYADSVKGRFTISRDNAKNSLYLQMNSLRAEDTAVYYCAREGRIAARGMDVWGQGTTVTVSS

SEQ ID NO: 845 - protein, 122 aa, Artificial Sequence
  Synthetic Construct
QVQLVQSGAEVKKPGASVKVSCKASGYTFTNYGLSWVRQAPGQGLEWMGWISANNGDTNYGQEFQGRVTMTTDTSTSTAYMELRSLRSDDTAVYYCARDSSSSWARWFFDLWGRGTLVTVSS

SEQ ID NO: 846 - protein, 120 aa, Artificial Sequence [sequence omitted]

SEQ ID NO: 847 - protein, 124 aa, Artificial Sequence
  Synthetic Construct
EEQLVESGGGLVKPGGSLRLSCAASGFSFSDCRMYWLRQAPGKGLEWIGVISVKSENYGANYAESVRGRFTISRDDSKNTVYLQMNSLKTEDTAVYYCSASYYRYDVGAWFAYWGQGTLVTVSS

SEQ ID NO: 848 - protein, 125 aa, Artificial Sequence
  Synthetic Construct
QVQLVESGGGVVQPGRSLRLSCAASGFTFSSYGMHWVRQAPGKGLEWVAVIWYDGSNKYYADSVKGRFTISRDNSKNTLYLQMNSLRAEDTAVYYCARDPRGATLYYYYYGMDVWGQGTTVTVSS

SEQ ID NO: 849 - protein, 120 aa, Artificial Sequence
  Synthetic Construct
EVQVLESGGDLVQPGGSLRLSCAASGFTFSAYAMTWVRQAPGKGLEWVSAISGSGGSAYYADSVKGRFTISRDNSKNTVYLQMNSLRAEDTAVYYCAKDGAWKMSGLDVWGQGTTVIVSS

SEQ ID NO: 850 - protein, 125 aa, Artificial Sequence
  Synthetic Construct
EVQLVESGGGLVQPGGSLRLSCAAAGFTFSSYSMNWVRQAPGKGLEWVSYISSRSRTIYYADSVKGRFTISRDNAKNSLYLQMNSLRDEDTAVYYCARDYGGQPPYYYYYGMDVWGQGTTVTVSS

SEQ ID NO: 851 - protein, 121 aa, Artificial Sequence [sequence omitted]

SEQ ID NO: 852 - protein, 117 aa, Artificial Sequence
  Synthetic Construct
QVQLVQSGAEVKKPGASVKVSCKASGYTFTNYDINWVRQAPGQGLEWIGWIYPGDGSTKYNEKFKAKATLTADTSTSTAYMELRSLRSDDTAVYYCASGYEDAMDYWGQGTTVTVSS

SEQ ID NO: 853 - protein, 124 aa, Artificial Sequence
  Synthetic Construct
EVQLVESGGGLVQPGGSLRLSCAVSGYSITSDYAWNWVRQAPGKGLEWVGYISNSGSTSYNPSLKSRFTISRDTSKNTLYLQMNSLRAEDTAVYYCARERNYDYDDYYYAMDYWGQGTLVTVSS

SEQ ID NO: 854 - protein, 118 aa, Artificial Sequence
  Synthetic Construct
EVQLVESGGGLVQPGGSLRLSCAASGFTFSHYTLSWVRQAPGKGLEWVSVISGDGSYTYYADSVKGRFTISSDNSKNTLYLQMNSLRAEDTAVYYCARNFIKYVFANWGQGTLVTVSS

SEQ ID NO: 855 - protein, 129 aa, Artificial Sequence
  Synthetic Construct
QVQLVQSGAEVKKPGASVKVSCKASGYTFTGYYMHWVRQAPGQGLEWMGWINPNSGGTNYAQKFQGRVTMTRDTSISTAYMELSRLRSDDTAVYYCARSPNPYYYDSSGYYYPGAFDIWGQGTMVTVSS

SEQ ID NO: 856 - protein, 119 aa, Artificial Sequence
  Synthetic Construct
QVQLVESGGGVVQPGRSLRLSCAASGFTFSSYDMHWVRQAPGKGLEWVAVIWYDGSNKYYADSVKGRFTISRDNSKNTLYLQMNSLRAEDTAVYYCARGSGNWGFFDYWGQGTLVTVSS

SEQ ID NO: 857 - protein, 119 aa, Artificial Sequence
  Synthetic Construct
QVQLQESGPGLVKPSETLSLTCTVSGFSLTNYGIHWIRQPPGKGLEWLGVIWARGFTNYNSALMSRLTISKDNSKNQVSLKLSSVTAADTAVYYCARANDGVYYAMDYWGQGTLVTVSS

SEQ ID NO: 858 - protein, 121 aa, Artificial Sequence [sequence omitted]

SEQ ID NO: 859 - protein, 121 aa, Artificial Sequence
  Synthetic Construct
QVQLQQSGAEVKKPGSSVKVSCKASGYTFTSYNMHWVKQAPGQGLEWIGAIYPGMGDTSYNQKFKGKATLTADESTNTAYMELSSLRSEDTAFYYCARSTYYGGDWYFDVWGQGTTVTVSS

SEQ ID NO: 860 - protein, 123 aa, Artificial Sequence [sequence omitted]

SEQ ID NO: 861 - protein, 120 aa, Artificial Sequence [sequence omitted]

SEQ ID NO: 862 - protein, 118 aa, Artificial Sequence
  Synthetic Construct
QVQLVQSGAEVKKPGASVKVSCKASGYTFTNYGMNWVRQAPGQGLKWMGWINTYTGEPTYADAFKGRVTMTRDTSISTAYMELSRLRSDDTAVYYCARDYGDYGMDYWGQGTTVTVSS

SEQ ID NO: 863 - protein, 117 aa, Artificial Sequence
  Synthetic Construct
QVELVESGGGLVQPGGSLRLSCAASGFTFTSYWMSWVRQAPGKGLELVSSITSYGSFTYYADSVKGRFTISRDNSKNTLYLQMNSLRAEDTAVYYCARNMYTHFDSWGQGTLVTVSS

SEQ ID NO: 864 - protein, 125 aa, Artificial Sequence [sequence omitted]

SEQ ID NO: 865 - protein, 115 aa, Artificial Sequence [sequence omitted]

SEQ ID NO: 866 - protein, 111 aa, Artificial Sequence
  Synthetic Construct
NIVLTQSPASLAVSLGQRATISCRASESVDNYGHSFMHWYQQKPGQPPKLLIYLASNLESGVPARFSGSGSRTDFTLTLDPVEADDAATYYCQQYNEDPPTFGSGTKLEIK

SEQ ID NO: 867 - protein, 107 aa, Artificial Sequence
  Synthetic Construct
AIQLTQSPSSLSASVGDRVTITCRPSQGINWELAWYQQKPGKAPKLLIYDASSLEQGVPSRFSGSGSGTDFTLTISSLQPEDFATYYCQQFNSYPLTFGGGTKVEIK

SEQ ID NO: 868 - protein, 110 aa, Artificial Sequence
  Synthetic Construct
SYVLTQPPSASGTPGQSVTISCSGSTSNIGSHYVVWYQQLPGTAPRLLIYRNHQRPSGVPDRLSGSKSGTSASLAIGGLRSEDEADYYCAVWDDTLSGWVFGGGTKLTVL

SEQ ID NO: 869 - protein, 107 aa, Artificial Sequence
  Synthetic Construct
DILMTQSPSSMSVSLGDTVSITCHASQGISSNIGWLQQKPGKSFMGLIYYGTNLVDGVPSRFSGSGSGADYSLTISSLDSEDFADYYCVQYAQLPYTFGGGTKLEIK

SEQ ID NO: 870 - protein, 107 aa, Artificial Sequence [sequence omitted]

SEQ ID NO: 871 - protein, 107 aa, Artificial Sequence [sequence omitted]

SEQ ID NO: 872 - protein, 107 aa, Artificial Sequence
  Synthetic Construct
DIQMTQSPSSVSASVGDRVTITCRASQGISSWLAWYQHKPGKAPKLLIYAASSLQSGVPSRFSGSGSGTDFTLTISSLQPEDFATYYCQQANSFPWTFGQGTKVEIK

SEQ ID NO: 873 - protein, 107 aa, Artificial Sequence [sequence omitted]

SEQ ID NO: 874 - protein, 108 aa, Artificial Sequence
  Synthetic Construct
EIVLTQSPATLSLSPGERATLSCRASQSVRSYLAWYQQKPGQAPRLLIYDASNRATGIPARFSGSGSGTDFTLTISSLEPEDFAVYYCQQRSNWPPATFGGGTKVEIK

SEQ ID NO: 875 - protein, 106 aa, Artificial Sequence
  Synthetic Construct
DIELTQSPAIMSASPGEKVTMTCSASSSVSYMHWYQQKSGTSPKRWIYDTSKLASGVPGRFSGSGSGNSYSLTISSVEAEDDATYYCQQWSKHPLTFGSGTKVEIK

SEQ ID NO: 876 - protein, 107 aa, Artificial Sequence
  Synthetic Construct
DIQMTQSPSSLSASVGDRVTITCKASQDVRNTVAWYQQKPGKAPKLLIYSSSYRNTGVPDRFSGSGSGTDFTLTISSLQAEDVAVYYCQQHYITPYTFGGGTKVEIK

SEQ ID NO: 877 - protein, 111 aa, Artificial Sequence
  Synthetic Construct
DIALTQPASVSGSPGQSITISCTGTSSDIGGYNSVSWYQQHPGKAPKLMIYGVNNRPSGVSNRFSGSKSGNTASLTISGLQAEDEADYYCSSYDIESATPVFGGGTKLTVL

SEQ ID NO: 878 - protein, 111 aa, Artificial Sequence
  Synthetic Construct
DIQMTQSPSSLSASVGDRVTITCKASESVDNYGKSLMHWYQQKPGKAPKLLIYRASNLESGVPSRFSGSGSGTDFTLTISSLQPEDFATYYCQQSNEDPWTFGGGTKVEIK

SEQ ID NO: 879 - protein, 110 aa, Artificial Sequence
  Synthetic Construct
QSVLTQPPSASGTPGQRVTISCSGSSSNIGNNYVSWYQQLPGTAPKLLIYENYNRPAGVPDRFSGSKSGTSASLAISGLRSEDEADYYCSSWDDSLNYWVFGGGTKLTVL

SEQ ID NO: 880 - protein, 106 aa, Artificial Sequence
  Synthetic Construct
QTVLSQSPAILSASPGEKVTMTCRASSSVTYIHWYQQKPGSSPKSWIYATSNLASGVPARFSGSGSGTSYSLTISRVEAEDAATYYCQHWSSKPPTFGGGTKLEIK

SEQ ID NO: 881 - protein, 107 aa, Artificial Sequence
  Synthetic Construct
DIQMTQSPSSLSASVGDRVTITCRASQDIAGSLNWLQQKPGKAIKRLIYATSSLDSGVPKRFSGSRSGSDYTLTISSLQPEDFATYYCLQYGSFPPTFGQGTKVEIK

SEQ ID NO: 882 - protein, 110 aa, Artificial Sequence
  Synthetic Construct
QSALTQPASVSGSPGQSITISCTGTSSDVGGYNYVSWYQQHPGKAPKLMIYDVSNRPSGVSNRFSGSKSGNTASLTISGLQAEDEADYYCSSYTSSSTRVFGTGTKVTVL

SEQ ID NO: 883 - protein, 113 aa, Artificial Sequence
  Synthetic Construct
DVVMTQTPLSLSVTPGQPASISCRSSQSLVHSNGNTYLHWYLQKPGQSPQLLIYKVSNRFSGVPDRFSGSGSGTDFTLKISRVEAEDVGVYFCSQSTHVPPFTFGGGTKVEIK

SEQ ID NO: 884 - protein, 112 aa, Artificial Sequence [sequence omitted]

SEQ ID NO: 885 - protein, 107 aa, Artificial Sequence
  Synthetic Construct
DIQMTQSPSSLSASLGERVSLTCRASQDIGSSLNWLQQGPDGTIKRLIYATSSLDSGVPKRFSGSRSGSDYSLTISSLESEDFVDYYCLQYVSSPPTFGAGTKLELK

SEQ ID NO: 886 - protein, 106 aa, Artificial Sequence
  Synthetic Construct
QIVLTQSPAIMSASPGEKVTITCSASSSVSYMNWFQQKPGTSPKLWIYSTSNLASGVPARFSGSGSGTSYSLTISRMEAEDAATYYCQQRSSYPNTFGGGTKLEIK

SEQ ID NO: 887 - protein, 107 aa, Artificial Sequence
  Synthetic Construct
DIQMTQSPSSLSASVGDRVTITCSASQDISNYLNWYQQKPGKAPKLLIYYTSNLHSGVPSRFSGSGSGTDFTLTISSLQPEDFATYYCQQYRKLPWTFGQGTKLEIK

SEQ ID NO: 888 - protein, 107 aa, Artificial Sequence [sequence omitted]

SEQ ID NO: 889 - protein, 107 aa, Artificial Sequence [sequence omitted]

SEQ ID NO: 890 - protein, 107 aa, Artificial Sequence
  Synthetic Construct
DIQMTQSPSSLSASVGDRVTITCRASQSINSYLNWYQQKPGKAPKLLIYAASSLQSGVPSRFSGSGSGTDFTLTISSLQPEDFATYYCQQQFDPPFTFGGGTKVEIK

SEQ ID NO: 891 - protein, 111 aa, Artificial Sequence
  Synthetic Construct
QSVLTQPPSASGTPGQRVTISCTGSSSNIGAGYDVHWYQQLPGTAPKLLIYDNNNRPSGVPDRFSGSKSGTSASLAISGLRSEDEADYYCQSYDSSLSAWLFGGGTKLTVL

SEQ ID NO: 892 - protein, 108 aa, Artificial Sequence
  Synthetic Construct
EIVLTQSPGTLSLSPGERATLSCRASQSVSSSYLAWYQQKPGQAPRLLIYGASSRATGIPDRFSGSGSGTDFTLTISRLEPEDFAVYYCQQYGSSTWTFGQGTKVEIK

SEQ ID NO: 893 - protein, 107 aa, Artificial Sequence
  Synthetic Construct
AIQLTQSPSSLSASVGDRVTITCRADESVRTLMHWYQQKPGKAPKLLIYLVSNSEIGVPDRFSGSGSGTDFRLTISSLQPEDFATYYCQQTWSDPWTFGQGTKVEIK

SEQ ID NO: 894 - protein, 112 aa, Artificial Sequence
  Synthetic Construct
DVVMTQSPLSLPVTPGEPASISCRSSQSLVHSTGNTYLHWYLQKPGQSPQLLIYKVSNRFSGVPDRFSGSGSGTDFTLKISRVEAEDVGVYYCSQSTHVPFTFGGGTKVEIK

SEQ ID NO: 895 - protein, 106 aa, Artificial Sequence
  Synthetic Construct
AIQLTQSPSSLSASVGDRVTITCRASQGISSALAWYQQKPGKAPKLLIYDASNLESGVPSRFSGSGSGTDFTLTISSLQPEDFATYYCQQFNSYPTFGQGTKVEIK

SEQ ID NO: 896 - protein, 111 aa, Artificial Sequence
  Synthetic Construct
DIQLTQSPASLAVSLGQRATISCKASQSVDYDGDSYLNWYQQIPGQPPKLLIYDASNLVSGIPPRFSGSGSGTDFTLNIHPVEKVDAATYHCQQSTEDPWTFGGGTKLEIK

SEQ ID NO: 897 - protein, 113 aa, Artificial Sequence
  Synthetic Construct
DVVMSQSPSSLAVSVGEKVTMSCKSSQSLLYSGNQKNYLAWYQQKPGQSPRLLIYWASTRESGVPDRFTGSGSGTDFTLTISSVKAEDLAVFYCQQYYNYPLTFGGGTHLTVL

SEQ ID NO: 898 - protein, 107 aa, Artificial Sequence [sequence omitted]

SEQ ID NO: 899 - protein, 107 aa, Artificial Sequence
  Synthetic Construct
DIQMTQSPSSLSASVGDRVTITCRASQGISSALAWYQQKPGKAPKLLIYSASYRYTGVPSRFSGSGSGTDFTFTISSLQPEDIATYYCQQRYSLWRTFGQGTKLEIK

SEQ ID NO: 900 - protein, 111 aa, Artificial Sequence
  Synthetic Construct
QSVLTQPPSVSGAPGQRVTISCTGSSSNTGAGYDVHWYQQVPGTAPKLLIYGSGNRPSGVPDRFSGSKSGTSASLAITGLQAEDEADYYCQSYDSSLSGWVFGGGTRLTVL

SEQ ID NO: 901 - protein, 111 aa, Artificial Sequence
  Synthetic Construct
DIVLTQSPASLAVSLGQRATISCKASQSVDFDGDSYMNWYQQKPGQPPKVLIYAASNLESGIPARFSGSGSGTDFTLNIHPVEEEDAATYYCQQSNEDPWTFGGGTKLEIK

SEQ ID NO: 902 - protein, 111 aa, Artificial Sequence [sequence omitted]

SEQ ID NO: 903 - protein, 111 aa, Artificial Sequence
  Synthetic Construct
MEIVMTQSPSTLSASVGDRVIITCQASEIIHSWLAWYQQKPGKAPKLLIYLASTLASGVPSRFSGSGSGAEFTLTISSLQPDDFATYYCQNVYLASTNGANFGQGTKLTVL

SEQ ID NO: 904 - protein, 109 aa, Artificial Sequence
  Synthetic Construct
QAVVTQEPSLTVSPGGTVTLTCRSSTGAVTTSNYANWFQQKPGQAPRTLIGGTNNRAPGVPARFSGSLLGGKAALTLSGAQPEDEAEYYCALWYSNHWVFGGGTKLTVL

SEQ ID NO: 905 - protein, 106 aa, Artificial Sequence
  Synthetic Construct
AIQLTQSPSSLSASVGDRVTITCRASQGISSALVWYQQKPGKAPKLLIYDASSLESGVPSRFSGSGSGTDFTLTISSLQPEDFATYYCQQFNDYFTFGPGTKVDIK

SEQ ID NO: 906 - protein, 111 aa, Artificial Sequence
  Synthetic Construct
EIVLTQSPATLSLSPGERATLSCKASQSVDYDGDNYMNWYQQKPGQAPRLLIYAASNLESGIPARFSGSGSGTDFTLTISSLEPEDFAVYYCHLSNEDLSTFGGGTKVEIK

SEQ ID NO: 907 - protein, 107 aa, Artificial Sequence
  Synthetic Construct
EIVLTQSPGTLSLSPGERATLSCRASQSVSSYLAWYQQKPGQAPRLLIYGASSRATGIPDRFSGSGSGTDFTLTISRLEPEDFAVYYCQQYGSSPLTFGGGTKVEIK

SEQ ID NO: 908 - protein, 107 aa, Artificial Sequence
  Synthetic Construct
DIQMTQSPSSLSASVGDRVTITCLASQTIGTWLTWYQQKPGKAPKLLIYTATSLADGVPSRFSGSGSGTDFTLTISSLQPEDFATYYCQQVYSIPWTFGGGTKVEIK

SEQ ID NO: 909 - protein, 112 aa, Artificial Sequence
  Synthetic Construct
DIVMTQSPLSVPVTPGEPVSISCRSSKSLLHSNGNTYLYWFLQRPGQSPQLLIYRMSNLVSGVPDRFSGSGSGTAFTLRISRVEAEDVGVYYCLQHLEYPFTFGPGTKLELK

SEQ ID NO: 910 - protein, 109 aa, Artificial Sequence
  Synthetic Construct
EIVLTQSPATLSLSPGERATLSCRASQSVSDAYLAWYQQKPGQAPRLLIYDASSRATGVPARFSGSGSGTDFTLTISSLEPEDFAVYYCHQYIQLHSFTFGQGTKVEIK

SEQ ID NO: 911 - protein, 106 aa, Artificial Sequence
  Synthetic Construct
QIVLSQSPAILSASPGEKVTMTCRASSSVSYMHWYQQKPGSSPKPWIYATSNLASGVPVRFSGSGSGTSYSLTISRVEAEDAATYYCQQWSSNPLTFGAGTKLELK

SEQ ID NO: 912 - protein, 108 aa, Artificial Sequence
  Synthetic Construct
DIQMTQSPSSLSASVGDRVTITCKASAAVGTYVAWYQQKPGKAPKLLIYSASYRKRGVPSRFSGSGSGTDFTLTISSLQPEDFATYYCHQYYTYPLFTFGQGTKLEIK

SEQ ID NO: 913 - protein, 107 aa, Artificial Sequence
  Synthetic Construct
EIVLTQSPATLSLSPGERATLSCRASQSVRSYLAWYQQKPGQAPRLLIYDASNRATGIPARFSGSGSGTDFTLTISSLEPEDFAVYYCQQRNYWPLTFGQGTKVEIK

SEQ ID NO: 914 - protein, 107 aa, Artificial Sequence
  Synthetic Construct
DILLTQSPVILSVSPGERVSFSCRASQSIGTNIHWYQQRTNGSPRLLIKYASESISGIPSRFSGSGSGTDFTLSINSVESEDIADYYCQQNNNWPTTFGAGTKLELK

SEQ ID NO: 915 - protein, 109 aa, Artificial Sequence
  Synthetic Construct
QAVVTQEPSLTVSPGGTVTLTCGSSTGAVTTSNYANWVQEKPGQAFRGLIGGTNKRAPGTPARFSGSLLGGKAALTLSGAQPEDEAEYYCALWYSNLWVFGGGTKLTVL

SEQ ID NO: 916 - protein, 112 aa, Artificial Sequence
  Synthetic Construct
DIQMTQSPSSLSASVGDRVTITCRSTKSLLHSNGITYLYWYQQKPGKAPKLLIYQMSNLASGVPSRFSSSGSGTDFTLTISSLQPEDFATYYCAQNLEIPRTFGQGTKVELK

SEQ ID NO: 917 - protein, 108 aa, Artificial Sequence
  Synthetic Construct
SSELTQDPAVSVALGQTVRITCQGDSLRSYYATWYQQKPGQAPILVIYGENKRPSGIPDRFSGSSSGNTASLTITGAQAEDEADYYCKSRDGSGQHLVFGGGTKLTVL

SEQ ID NO: 918 - protein, 110 aa, Artificial Sequence
  Synthetic Construct
AIQMTQSPSSLSASVGDRVTITCQASQSINNELSWYQQKPGKAPKLLIYRASTLASGVPSRFSGSGSGTDFTLTISSLQPDDFATYYCQQGYSLRNIDNAFGGGTKVEIK

SEQ ID NO: 919 - protein, 108 aa, Artificial Sequence
  Synthetic Construct
DIQLTQSPSSLSASVGDRVTMTCSASSSVSSSYLYWYQQKPGKAPKLWIYSTSNLASGVPARFSGSGSGTDFTLTISSLQPEDSASYFCHQWNRYPYTFGGGTRLEIK

SEQ ID NO: 920 - protein, 112 aa, Artificial Sequence
  Synthetic Construct
DVVMTQSPLSLPVTPGEPASISCRSSQSLVHSNRNTYLHWYLQKPGQSPQLLIYKVSNRFSGVPDRFSGSGSGTDFTLKISRVEAEDVGVYYCSQNTHVPPTFGQGTKLEIK

SEQ ID NO: 921 - protein, 111 aa, Artificial Sequence
  Synthetic Construct
EIVLTQSPATLSLSPGERATLSCRASESVDSYGKSFMHWYQQKPGQAPRLLIYRASNLESGIPARFSGSGSGTDFTLTISSLEPEDFAVYYCQQSNEDPWTFGGGTKLEIK

SEQ ID NO: 922 - protein, 104 aa, Artificial Sequence
  Synthetic Construct
EIVLTQSPAIMSASPGERVTMTCSASSGVNYMHWYQQKPGTSPRRWIYDTSKLASGVPARFSGSGSGTDYSLTISSMEPEDAATYYCHQRGSYTFGGGTKLEIK

SEQ ID NO: 923 - protein, 108 aa, Artificial Sequence
  Synthetic Construct
EIVLTQSPGTLSLSPGERATLSCRASQGISRSYLAWYQQKPGQAPSLLIYGASSRATGIPDRFSGSGSGTDFTLTISRLEPEDFAVYYCQQFGSSPWTFGQGTKVEIK

SEQ ID NO: 924 - protein, 112 aa, Artificial Sequence [sequence omitted]

SEQ ID NO: 925 - protein, 106 aa, Artificial Sequence
  Synthetic Construct
DIVMTQSPLSLSTSVGDRVSLTCKASQNVGTAVAWYQQKPGQSPKLLIYSASNRYTGVPDRFTGSGSGTDFTLTISNMQSEDLADYFCQQYSSYPLTFGAGTKLEL

SEQ ID NO: 926 - protein, 112 aa, Artificial Sequence
  Synthetic Construct
DIVMTQSPLSLPVTPGEPASISCRSSQSLVYSNGDTYLHWYLQKPGQSPQLLIYKVSNRFSGVPDRFSGSGSGTDFTLKISRVEAEDVGVYYCSQSTHVPWTFGQGTKVEIK

SEQ ID NO: 927 - protein, 111 aa, Artificial Sequence
  Synthetic Construct
DIQMTQSPSSLSASVGDRVTITCKASQSVDYDGESYMNWYQQKPGKAPKLLIYAASNLESGVPSRFSGSGSGTDFTLTISSLQPEDFATYYCQQSDENPLTFGGGTKVEIK

SEQ ID NO: 928 - protein, 107 aa, Artificial Sequence
  Synthetic Construct
DIQMTQSPSSLSASVGDRVTITCRASQGIRNDLGWYQQKPGKAPKRLIYAASSLQSGVPSRFSGSGSGTEFILTVSSLQPEDFATYYCLQYNSNPFTFGPGTKVDIK

SEQ ID NO: 929 - protein, 110 aa, Artificial Sequence
  Synthetic Construct
QAVVTQEPSLTVSPGGTVTLTCGLKSGSVTSDNFPTWYQQTPGQAPRLLIYNTNTRHSGVPDRFSGSILGNKAALTITGAQADDEAEYFCALFISNPSVEFGGGTQLTVL

SEQ ID NO: 930 - protein, 112 aa, Artificial Sequence [sequence omitted]

SEQ ID NO: 931 - protein, 112 aa, Artificial Sequence
  Synthetic Construct
DIVMTQSPLSLPVTPGQPASISCRSSQSIVHSNGNTWLQWWLQKPGQSPQLLIWKVSNRLWGVPDRFSGSGSGTDFTLKISRVQAQDVGVWWCFQGSHVPWTFGQGTKVQIK

SEQ ID NO: 932 - protein, 107 aa, Artificial Sequence
  Synthetic Construct
DIQMTQSPSSLSASVGDRVTITCRASEDLYYNLAWYQRKPGKAPKLLIYDTYRLADGVPSRFSGSGSGTDYTLTISSLQPEDFASYYCQQYYKFPFTFGQGTKVEIK

SEQ ID NO: 933 - protein, 107 aa, Artificial Sequence [sequence omitted]

SEQ ID NO: 934 - protein, 109 aa, Artificial Sequence
  Synthetic Construct
EIVLTQSPATLSLSPGERAILSCRAGQSVSSYLVWYQQKPGQAPRLLIYDASNRATGIPARFSGSGSGTDFTLTISSLEPEDFAVYYCQQRSSWPPVYTFGQGTKLEIK

SEQ ID NO: 935 - protein, 111 aa, Artificial Sequence
  Synthetic Construct
DIVMTQSPDSLAVSLGERATISCRASESVDNYGISFMKWFQQKPGQPPKLLIYAASNQGSGVPDRFSGSGSGTDFTLTISSLQAEDVAVYYCQQSKEVPWTFGGGTKVEIK

SEQ ID NO: 936 - protein, 106 aa, Artificial Sequence
  Synthetic Construct
EIVLTQSPATLSLSPGERATLSCSASSSVSYMHWYQQKPGQAPRLLIYDTSKLASGIPARFSGSGSGTDFTLTISSLEPEDVAVYYCFQGSVYPFTFGQGTKLEIK

SEQ ID NO: 937 - protein, 108 aa, Artificial Sequence
  Synthetic Construct
EIVLTQSPGTLSLSPGERATLSCRASQSVRGRYLAWYQQKPGQAPRLLIYGASSRATGIPDRFSGSGSGTDFTLTISRLEPEDFAVFYCQQYGSSPRTFGQGTKVEIK

SEQ ID NO: 938 - protein, 107 aa, Artificial Sequence
  Synthetic Construct
DIQMTQSPSSMSVSVGDRVTITCHSSQDINSNIGWLQQKPGKSFKGLIYHGTNLDDGVPSRFSGSGSGTDYTLTISSLQPEDFATYYCVQYAQFPWTFGGGTKLEIK

SEQ ID NO: 939 - protein, 108 aa, Artificial Sequence
  Synthetic Construct
ENVLTQSPAIMSASPGEKVTMTCRASSSVSSSYLHWYQQKSGASPKLWIYSTSNLASGVPARFSGSGSGTSYSLTISSVEAEDAATYYCQQYSGYPLTFGGGTKLEIK

SEQ ID NO: 940 - protein, 107 aa, Artificial Sequence
  Synthetic Construct
DIQMTQSPSSLSASVGDRVTITCRASENIYSYLAWYQQKPGKAPKLLIHNAKTLAEGVPSRFSGSGSGTDFTLTISSLQPEDFATYYCQHHYGAPLTFGQGTKLEIK

SEQ ID NO: 941 - protein, 113 aa, Artificial Sequence [sequence omitted]

SEQ ID NO: 942 - protein, 111 aa, Artificial Sequence [sequence omitted]

SEQ ID NO: 943 - protein, 107 aa, Artificial Sequence
  Synthetic Construct
DIQMTQSPSSLSASVGDRVTITCKASQDVSTAVAWYQQKPGKAPKLLIYSASYRYTGVPSRFSGSGSGTDFTLTISSLQPEDFATYYCQQHYSTPWTFGGGTKVEIK

SEQ ID NO: 944 - protein, 107 aa, Artificial Sequence [sequence omitted]

SEQ ID NO: 945 - protein, 107 aa, Artificial Sequence [sequence omitted]

SEQ ID NO: 946 - protein, 111 aa, Artificial Sequence
  Synthetic Construct
QSVLTQPPSVSAAPGQKVTISCSGSSSNIENNHVSWYQQLPGTAPKLLIYDNNKRPSGIPDRFSGSKSGTSATLGITGLQTGDEADYYCETWDTSLSAGRVFGGGTKLTVL

SEQ ID NO: 947 - protein, 106 aa, Artificial Sequence
  Synthetic Construct
ENVLTQSPATLSVTPGEKATITCRASQSVSYMHWYQQKPGQAPRLLIYDASNRASGVPSRFSGSGSGTDHTLTISSLEAEDAATYYCFQGSVYPFTFGQGTKLEIK

SEQ ID NO: 948 - protein, 109 aa, Artificial Sequence
  Synthetic Construct
QAVVTQEPSLTVSPGGTVTLTCRSSTGAVTTSNYANWVQQKPGQAPRGLIGGTNKRAPWTPARFSGSLLGGKAALTITGAQAEDEADYYCALWYSNLWVFGGGTKLTVL

SEQ ID NO: 949 - protein, 107 aa, Artificial Sequence [sequence omitted]

SEQ ID NO: 950 - protein, 109 aa, Artificial Sequence
  Synthetic Construct
EIVLTQSPGTLSLSPGERATLSCRASQSVSSSYLAWYQQKPGQAPRLLIYGASSRATGIPDRFSGSGSGTDFTLTISRLEPEDFAVYYCQQYGSSPIFTFGPGTKVDIK

SEQ ID NO: 951 - protein, 109 aa, Artificial Sequence
  Synthetic Construct
QSALTQPRSVSGSPGQSVTISCTGTSSSVGDSIYVSWYQQHPGKAPKLMLYDVTKRPSGVPDRFSGSKSGNTASLTISGLQAEDEADYYCYSYAGTDTLFGGGTKVTVL

SEQ ID NO: 952 - protein, 107 aa, Artificial Sequence
  Synthetic Construct
DIQMTQSPSSLSASVGDRVTITCRASQGISNWLAWYQQKPGKAPKLLIYGASSLQSGVPSRFSGSGSGTDFTLTISSLQPEDFATYYCQQYSSFPTTFGQGTKVEIK

SEQ ID NO: 953 - protein, 107 aa, Artificial Sequence
  Synthetic Construct
DIQMTQSPSSLSASVGDRVTITCKASQDVGIAVAWYQQKPGKVPKLLIYWASTRHTGVPDRFSGSGSGTDFTLTISSLQPEDVATYYCQQYSSYPYTFGQGTKVEIK

SEQ ID NO: 954 - protein, 106 aa, Artificial Sequence
  Synthetic Construct
DIQMTQSPSSLSASVGDRVTITCRASEDVNTYVSWYQQKPGKAPKLLIYAASNRYTGVPSRFSGSGSGTDFTLTISSLQPEDFATYYCQQSFSYPTFGQGTKLEIK

SEQ ID NO: 955 - protein, 111 aa, Artificial Sequence
  Synthetic Construct
NFMLTQPHSVSESPGKTVTISCTRSSGSIASNYVQWYQQRPGSSPTTVIYEDNQRPSGVPDRFSGSIDSSSNSASLTISGLKTEDEADYYCQSYDGSNRWMFGGGTKLTVL

SEQ ID NO: 956 - protein, 108 aa, Artificial Sequence [sequence omitted]

SEQ ID NO: 957 - protein, 107 aa, Artificial Sequence
  Synthetic Construct
DIQMTQSPSSLSASVGDRVTITCKASRNIERQLAWYQQKPGQAPELLIYQASRKESGVPDRFSGSRYGTDFTLTISSLQPEDIATYYCQQYSDPPLTFGGGTKVEIK

SEQ ID NO: 958 - protein, 108 aa, Artificial Sequence
  Synthetic Construct
EIVLTQSPGTLSLSPGERATLSCRASQSVSSSYLAWYQQKPGQAPRLLIYGASSRATGIPDRFSGSGSGTDFTLTISRLEPEDFAVYYCQQYGSSPYTFGQGTKLEIK

SEQ ID NO: 959 - protein, 111 aa, Artificial Sequence
  Synthetic Construct
DIQMTQSPSSLSASVGDRVTITCRASQSVSTSSYSYMHWYQQKPGKAPKLLIKYASNLESGVPSRFSGSGSGTDFTLTISSLQPEDFATYYCQHSWEIPYTFGGGTKVEIK

SEQ ID NO: 960 - protein, 107 aa, Artificial Sequence
  Synthetic Construct
DIQMTQSPSSVSASVGDRVTITCRASQGISGWLAWYQQKPGKAPKFLIYAASTLQSGVPSRFSGSGSGTDFTLTISSLQPEDFATYYCQQANSFPPTFGGGTKVEIK

SEQ ID NO: 961 - protein, 107 aa, Artificial Sequence
  Synthetic Construct
DIQMTQSPSSLSASVGDRVTITCKASQHVITHVTWYQQKPGKAPKLLIYGTSYSYSGVPSRFSGSGSGTDFTLTISSLQPEDFATYYCQQFYEYPLTFGGGTKVEIK

SEQ ID NO: 962 - protein, 107 aa, Artificial Sequence
  Synthetic Construct
EIVLTQSPATLSLSPGERATLSCRASQSVSSYLAWYQQKPGQAPRLLIYDASNRATGIPARFSGSGSGTDFTLTISSLEPEDFAVYYCQHRSNWPPTFGGGTKVEIK

SEQ ID NO: 963 - protein, 106 aa, Artificial Sequence
  Synthetic Construct
QVVLTQSPVIMSASPGEKVTMTCSASSSISYMYWYQQKPGTSPKRWIYDTSKLASGVPARFSGSGSGTSYSLTISNMEAGDAATYYCHQRDSYPWTFGGGTNLEIK

SEQ ID NO: 964 - protein, 112 aa, Artificial Sequence [sequence omitted]

SEQ ID NO: 965 - protein, 112 aa, Artificial Sequence
  Synthetic Construct
QVLTQSPSSLSASVGDRVTINCQASQSVYHNTYLAWYQQKPGKVPKQLIYDASTLASGVPSRFSGSGSGTDFTLTISSLQPEDVATYYCLGSYDCTNGDCFVFGGGTKVEIK

SEQ ID NO: 966 - protein, 107 aa, Artificial Sequence
  Synthetic Construct
EIVLTQSPATLSLSPGERATLSCQASQSISNFLHWYQQRPGQAPRLLIRYRSQSISGIPARFSGSGSGTDFTLTISSLEPEDFAVYYCQQSGSWPLTFGGGTKVEIK

SEQ ID NO: 967 - protein, 107 aa, Artificial Sequence
  Synthetic Construct
DIQMTQSPSSLSASVGDRVTITCKASQDVSTAVAWYQQKPGKAPKLLIYSASYRYTGVPSRFSGSGSGTDFTFTISSLQPEDIATYYCQQHYSTPWTFGQGTKVEIK

SEQ ID NO: 968 - protein, 107 aa, Artificial Sequence [sequence omitted]

SEQ ID NO: 969 - protein, 109 aa, Artificial Sequence [sequence omitted]

SEQ ID NO: 970 - protein, 110 aa, Artificial Sequence
  Synthetic Construct
DIQLTQSPSSLSASVGDRVTITCSVSSSISSNNLHWYQQKPGKAPKPWIYGTSNLASGVPSRFSGSGSGTDYTFTISSLQPEDIATYYCQQWSSYPYMYTFGQGTKVEIK

SEQ ID NO: 971 - protein, 111 aa, Artificial Sequence
  Synthetic Construct
QAVLTQPPSVSGAPGQRVTISCTGSSSNIGAGYGVHWYQQLPGTAPKLLIYGDSNRPSGVPDRFSGSKSGTSASLAITGLQAEDEADYYCQSYDNSLSGYVFGGGTQLTVL

SEQ ID NO: 972 - protein, 107 aa, Artificial Sequence
  Synthetic Construct
DIVMTQSPDSLAMSLGERVTLNCKASENVVSYVSWYQQKPGQSPKLLIYGASNRESGVPDRFSGSGSATDFTLTISSVQAEDVADYHCGQSYNYPYTFGQGTKLEIK

SEQ ID NO: 973 - protein, 107 aa, Artificial Sequence [sequence omitted]

SEQ ID NO: 974 - protein, 107 aa, Artificial Sequence
  Synthetic Construct
EIVLTQSPATLSLSPGERATLSCRASENIWNNLAWYQQKPGQAPRLLISGASTGATGVPSRFRGSGSRTEFTLTISSLQSEDFAIYFCQQYNSWPRTFGPGTKVEIK

SEQ ID NO: 975 - protein, 108 aa, Artificial Sequence
  Synthetic Construct
EIVLTQSPATLSLSPGERATLSCRASQSVSSYLAWYQQKPGQAPRLLIYDASNRATGIPARFSGSGSGTDFTLTISSLEPEDFAVYYCQQRSNWLMYTFGQGTKLEIK

SEQ ID NO: 976 - protein, 107 aa, Artificial Sequence [sequence omitted]

SEQ ID NO: 977 - protein, 108 aa, Artificial Sequence [sequence omitted]

SEQ ID NO: 978 - protein, 107 aa, Artificial Sequence
  Synthetic Construct
DIQMTQSPSSLSASVGDRVTITCRASQGIRNDLGWYQQKPGKAPKLLIYAASSLQSGVPSRFSGSGSGTDFTLTISSLQPEDFATYYCQQLNSYPPTFGGGTKVEIK

SEQ ID NO: 979 - protein, 107 aa, Artificial Sequence
  Synthetic Construct
DIQMTQTTSSLSASLGDRVTISCRTSQDIGNYLNWYQQKPDGTVKLLIYYTSRLHSGVPSRFSGSGSGTDFSLTINNVEQEDVATYFCQHYNTVPPTFGGGTKLEIK

SEQ ID NO: 980 - protein, 107 aa, Artificial Sequence
  Synthetic Construct
DIQMTQSPSSLSASVGDRVTITCRASKDISKYLNWYQQKPGKAPKLLIYYTSGYHSGVPSRFSGSGSGTDFTLTISSLQPEDFATYYCQQGDALPPTFGGGTKVEIK

SEQ ID NO: 981 - protein, 110 aa, Artificial Sequence [sequence omitted]

SEQ ID NO: 982 - protein, 112 aa, Artificial Sequence [sequence omitted]

SEQ ID NO: 983 - protein, 108 aa, Artificial Sequence [sequence omitted]

SEQ ID NO: 984 - protein, 111 aa, Artificial Sequence [sequence omitted]

SEQ ID NO: 985 - protein, 107 aa, Artificial Sequence [sequence omitted]

SEQ ID NO: 986 - protein, 107 aa, Artificial Sequence
  Synthetic Construct
DIVMTQSQRFMSTTVGDRVSITCKASQNVVSAVAWYQQKPGQSPKLLIYSASNRYTGVPDRFTGSGSGTDFTLTISNMQSEDLADFFCQQYSNYPWTFGGGTKLEIK

SEQ ID NO: 987 - protein, 108 aa, Artificial Sequence [sequence omitted]

SEQ ID NO: 988 - protein, 112 aa, Artificial Sequence
  Synthetic Construct
DIVMTQSPDSLAVSLGERVTMNCKSSQSLLYSTNQKNYLAWYQQKPGQSPKLLIYWASTRESGVPDRFSGSGSGTDFTLTISSVQAEDVAVYYCQQYYSYRTFGGGTKLEIK

SEQ ID NO: 989 - protein, 108 aa, Artificial Sequence
  Synthetic Construct
EIVLTQSPGTLSLSPGERATLSCRASQSVSSSYLAWYQQKPGQAPRLLIYGASSRATGIPDRFSGSGSGTDFTLTISRLEPEDFAVYYCQQYGSSPLTFGGGTKVEIK

SEQ ID NO: 990 - protein, 112 aa, Artificial Sequence
  Synthetic Construct
DVVMTQSPLSLPVTLGQPASISCKSSQSLLYTDGKTYLYWFLQRPGQSPRRLIYLVSKLDSGVPDRFSGSGSGTDFTLKISRVEAEDVGVYYCLQSTHFPHTFGGGTKVEIK

SEQ ID NO: 991 - protein, 107 aa, Artificial Sequence
  Synthetic Construct
DIQMTQSPSSLSASVGDRVTITCRSSQRIMTYLNWYQQKPGKAPKLLIFVASHSQSGVPSRFRGSGSETDFTLTISGLQPEDSATYYCQQSFWTPLTFGGGTKVEIK

SEQ ID NO: 992 - protein, 106 aa, Artificial Sequence [sequence omitted]

SEQ ID NO: 993 - protein, 107 aa, Artificial Sequence
  Synthetic Construct
EIVLTQSPATLSLSPGERATLSCRASQSVSSYLAWYQQKPGQAPRLLIYDASNRATGIPARFSGSGSGTDFTLTISSLEPEDFAVYYCQQRSNWPLTFGGGTKVEIK

SEQ ID NO: 994 - protein, 107 aa, Artificial Sequence
  Synthetic Construct
DIQMTQSTSSLSASLGDRVTISCSASQGINNYLNWYQQKPDGTVELLIYYTSTLQSGVPSRFSGSGSGTDYSLTISNLEPEDIGTYYCQQYSKLPRTFGGGTKLEIK

SEQ ID NO: 995 - protein, 107 aa, Artificial Sequence
  Synthetic Construct
EIVMTQSPATLSVSPGERATLSCRASQSVSRNLAWYQQKPGQAPRLLIYGASTRATGIPARFSGSGSGTEFTLTIGSLQSEDFAVYYCQQYKTWPRTFGQGTNVEIK

SEQ ID NO: 996 - protein, 108 aa, Artificial Sequence
  Synthetic Construct
EIVLTQSPATLSLSPGERATLSCRASQSVSSYLAWYQQKPGQAPRLLIYDASNRATGIPARFSGSGSGTDFTLTISSLEPEDFAVYYCQQRSNWPPFTFGPGTKVDIK

SEQ ID NO: 997 - protein, 112 aa, Artificial Sequence
  Synthetic Construct
DVQVTQSPSSLSASVGDRVTITCRSSQSLANSYGNTFLSWYLHKPGKAPQLLIYGISNRFSGVPDRFSGSGSGTDFTLTISSLQPEDFATYYCLQGTHQPYTFGQGTKVEIK

SEQ ID NO: 998 - protein, 107 aa, Artificial Sequence
  Synthetic Construct
DIQMTQSPSSLSASVGDRVTITCKASRDIRSYLTWYQQKPGKAPKTLIYYATSLADGVPSRFSGSGSGQDYSLTISSLESDDTATYYCLQHGESPFTLGSGTKLEIK

SEQ ID NO: 999 - protein, 106 aa, Artificial Sequence
  Synthetic Construct
DIQLTQSPSSLSASVGDRVTITCKASQDVGTSVAWYQQKPGKAPKLLIYWTSTRHTGVPSRFSGSGSGTDFTFTISSLQPEDIATYYCQQYSLYRSFGQGTKVEIK

SEQ ID NO: 1000 - protein, 107 aa, Artificial Sequence [sequence omitted]

SEQ ID NO: 1001 - protein, 108 aa, Artificial Sequence
  Synthetic Construct
EIVLTQSPGTLSLSPGERATLSCRASSSVSSSYLHWYQQKPGQAPRLLIYSTSNLVAGIPDRFSGSGSGTDFTLTISRLEPEDFAVYYCQHHSGYHFTFGGGTKVEIK

SEQ ID NO: 1002 - protein, 111 aa, Artificial Sequence [sequence omitted]

SEQ ID NO: 1003 - protein, 107 aa, Artificial Sequence [sequence omitted]

SEQ ID NO: 1004 - protein, 112 aa, Artificial Sequence
  Synthetic Construct
DIQMTQSPSSLSASVGDRVTITCRSSETLVHSSGNTYLEWYQQKPGKAPKLLIYRVSNRFSGVPSRFSGSGSGTDFTLTISSLQPEDFATYYCFQGSFNPLTFGQGTKVEIK

SEQ ID NO: 1005 - protein, 107 aa, Artificial Sequence
  Synthetic Construct
DIVMTQSHKLLSTSVGDRVSITCKASQDVSTAVDWYQQKPGQSPKLLINWASTRHTGVPDRFTGSGSGTDYTLTISSMQAEDLALYYCRQHYSTPFTFGSGTKLEIK

SEQ ID NO: 1006 - protein, 111 aa, Artificial Sequence
  Synthetic Construct
DIQMTQSPSSLSASVGDRVTITCRASESVDNYGISFMNWFQQKPGKAPKLLIYAASNQGSGVPSRFSGSGSGTDFTLTISSLQPDDFATYYCQQSKEVPWTFGQGTKVEIK

SEQ ID NO: 1007 - protein, 107 aa, Artificial Sequence
  Synthetic Construct
EIVLTQSPVTLSLSPGERATLSCRASQSVSSYLAWYQQKPGQAPRLLIYDASNRATGIPARFSGSGSGTDFTLTISSLEPEDFAVYYCQQRSNWMYTFGQGTKLEIK

SEQ ID NO: 1008 - protein, 106 aa, Artificial Sequence
  Synthetic Construct
QIVLTQSPATLSVSPGERATLSCRASQSVSYMHWYQQKPGQAPRLLIYGVFRRATGIPDRFSGSGSGTDFTLTIGRLEPEDFAVYYCLQWSSDPPTFGQGTKLEIK

SEQ ID NO: 1009 - protein, 111 aa, Artificial Sequence
  Synthetic Construct
EIVMTQSPASLSLSQEEKVTITCKASQSVSFAGTGLMHWYQQKPGQAPKLLIYRASNLEAGVPSRFSGSGSGTDFSFTISSLEPEDVAVYYCQQSREYPWTFGQGTKLEIK

SEQ ID NO: 1010 - protein, 112 aa, Artificial Sequence
  Synthetic Construct
DVVMTQSPLSLPVTLGQPASISCRSSQIIIHSDGNTYLEWFQQRPGQSPRRLIYKVSNRFSGVPDRFSGSGSGTDFTLKISRVEAEDVGVYYCFQGSHVPHTFGQGTKVEIK

SEQ ID NO: 1011 - protein, 107 aa, Artificial Sequence
  Synthetic Construct
DIQMTQSPSSLSASVGDRVTITCRASQDIRYYLNWYQQKPGKAPKLLIYVASSLQSGVPSRFSGSGSGTEFTLTVSSLQPEDFATYYCLQVYSTPRTFGQGTKVEIK

SEQ ID NO: 1012 - protein, 113 aa, Artificial Sequence
  Synthetic Construct
DIVMTQSPDSLAVSLGERATINCKSSQSVLNSGNQKNYLTWYQQKPGQPPKLLIYWASTRESGVPDRFSGSGSGTDFTLTISSLQAEDVAVYYCQSDYSYPYTFGQGTKLEIK

SEQ ID NO: 1013 - protein, 107 aa, Artificial Sequence
  Synthetic Construct
DIVMTQSHKFMSTSVGDRVSITCKASQDVNTAVAWYQQKPGHSPKLLIYSASFRYTGVPDRFTGSRSGTDFTFTISSVQAEDLAVYYCQQHYTTPPTFGGGTKVEIK

SEQ ID NO: 1014 - protein, 106 aa, Artificial Sequence [sequence omitted]

SEQ ID NO: 1015 - protein, 113 aa, Artificial Sequence [sequence omitted]

SEQ ID NO: 1016 - protein, 112 aa, Artificial Sequence
  Synthetic Construct
DIQLTQSPLSLPVTLGQPASISCRSSQSLVHRNGNTYLHWFQQRPGQSPRLLIYTVSNRFSGVPDRFSGSGSGTDFTLKISRVEAEDVGVYFCSQSSHVPPTFGAGTRLEIK

SEQ ID NO: 1017 - protein, 111 aa, Artificial Sequence
  Synthetic Construct
DIVLTQSPLSLAVSLGQPAIISCKASQSVSFAGTSLMHWYHQKPGQQPRLLIYRASNLEAGVPDRFSGSGSKTDFTLTISPVEAEDAATYYCQQSREYPYTFGGGTKLEIK

SEQ ID NO: 1018 - protein, 112 aa, Artificial Sequence
  Synthetic Construct
DIVMTQAAFSNPVTLGTSASISCRSSKSLLHSNGITYLYWYLQKPGQSPQLLIYQMSNLASGVPDRFSSSGSGTDFTLRISRVEAEDVGVYYCAQNLELPYTFGGGTKLEIK

SEQ ID NO: 1019 - protein, 112 aa, Artificial Sequence
  Synthetic Construct
DVLMTQSPLSLPVTPGEPASISCRSSRNIVHINGDTYLEWYLQKPGQSPQLLIYKVSNRFSGVPDRFSGSGSGTDFTLKISRVEAEDVGVYYCFQGSLLPWTFGQGTKVEIK

SEQ ID NO: 1020 - protein, 107 aa, Artificial Sequence
  Synthetic Construct
DIQMTQSPSSLSASVGDRVTITCRASENIYSYLAWYQQKPGKAPKLLIYNAKTLAEGVPSRFSGSGSGTDFTLTISSLQPEDFATYYCQHHYGTPRTFGGGTKVEIK

SEQ ID NO: 1021 - protein, 106 aa, Artificial Sequence [sequence omitted]

SEQ ID NO: 1022 - protein, 106 aa, Artificial Sequence [sequence omitted]

SEQ ID NO: 1023 - protein, 107 aa, Artificial Sequence
  Synthetic Construct
DIQMTQSPSSVSASVGDRVTIACRASQNIRNILNWYQQRPGKAPQLLIYAASNLQSGVPSRFSGSGSGTDFTLTINSLQPEDFATYYCQQSYSMPRTFGGGTKLEIK

SEQ ID NO: 1024 - protein, 107 aa, Artificial Sequence
  Synthetic Construct
EIVLTQSPATLSLSPGERATLSCRASQSVSRYLAWYQQKPGQAPRLLIYDASNRATGIPARFSGSGSGTDFTLTISSLEPEDFAVYYCQQRSNWPRTFGQGTKVEIK

SEQ ID NO: 1025 - protein, 108 aa, Artificial Sequence [sequence omitted]

SEQ ID NO: 1026 - protein, 107 aa, Artificial Sequence [sequence omitted]

SEQ ID NO: 1027 - protein, 107 aa, Artificial Sequence
  Synthetic Construct
DIQMTQSPSSLSASVGDRVTITCQASEDIYSFVAWYQQKPGKAPKLLIYNAQTEAQGVPSRFSGSGSGTDFTLTISSLQPEDFATYYCQHHYDSPLTFGGGTKVEIK

SEQ ID NO: 1028 - protein, 107 aa, Artificial Sequence
  Synthetic Construct
EIVLTQSPGTLSLSPGERATLSCRASQSVSSTYLAWYQQKPGQAPRLLIYGASSRATGIPDRFSGSGSGTDFTLTISRLEPEDFAVYYCQHYDNSQTFGQGTKVEIK

SEQ ID NO: 1029 - protein, 107 aa, Artificial Sequence
  Synthetic Construct
DIQMTQSPSSLSASVGDRVTITCRASQDIRNYLNWYQQKPGKAVKLLIYYTSRLLPGVPSRFSGSGSGTDYSLTISSQEQEDIGTYFCQQGNTLPWTFGQGTKVEIR

SEQ ID NO: 1030 - protein, 112 aa, Artificial Sequence
  Synthetic Construct
DIVMTQTPLSLPVTPGEPASISCRSSKSLLHSNGITYLYWYLQKPGQSPQLLIYQMSNLVSGVPDRFSGSGSGTDFTLKISRVEAEDVGVYYCAQNLELPYTFGGGTKVEIK

SEQ ID NO: 1031 - protein, 106 aa, Artificial Sequence
  Synthetic Construct
EIVLTQSPGTLSLSPGERATLSCRASSSVPYIHWYQQKPGQAPRLLIYATSALASGIPDRFSGSGSGTDFTLTISRLEPEDFAVYYCQQWLSNPPTFGQGTKLEIK

SEQ ID NO: 1032 - protein, 107 aa, Artificial Sequence
  Synthetic Construct
EIVLTQSPATLSLSPGERATLSCRASQSVSSYLAWYQQKPGQAPRLLIYDASNRATGIPARFSGSGSGTDFTLTISSLEPEDFAVYYCQQRSNWPPAFGQGTKVEIK

SEQ ID NO: 1033 - protein, 107 aa, Artificial Sequence [sequence omitted]

SEQ ID NO: 1034 - protein, 113 aa, Artificial Sequence [sequence omitted]

SEQ ID NO: 1035 - protein, 110 aa, Artificial Sequence
  Synthetic Construct
QSVLTQPPSASGTPGQRVTISCSGSNTNIGKNYVSWYQQLPGTAPKLLIYANSNRPSGVPDRFSGSKSGTSASLAISGLRSEDEADYYCASWDASLNGWVFGGGTKLTVL

SEQ ID NO: 1036 - protein, 110 aa, Artificial Sequence [sequence omitted]

SEQ ID NO: 1037 - protein, 107 aa, Artificial Sequence
  Synthetic Construct
EIVLTQSPATLSLSPGERATLSCRASENVYSYLAWYQQKPGQAPRLLIYFAKTLAEGIPARFSGSGSGTDFTLTISSLEPEDFAVYYCQHHSDNPWTFGQGTKVEIK

SEQ ID NO: 1038 - protein, 107 aa, Artificial Sequence
  Synthetic Construct
DIQMTQSPSSLSASVGDRVTITCRASQGISSWLAWYQQKPEKAPKSLIYAASSLQSGVPSRFSGSGSGTDFTLTISSLQPEDFATYYCQQYNSYPYTFGQGTKLEIK

SEQ ID NO: 1039 - protein, 112 aa, Artificial Sequence [sequence omitted]

SEQ ID NO: 1040 - protein, 106 aa, Artificial Sequence
  Synthetic Construct
DIQMTQSPSTLSASVGDRVTITCKCQLSVGYMHWYQQKPGKAPKLLIYDTSKLASGVPSRFSGSGSGTEFTLTISSLQPDDFATYYCFQGSGYPFTFGGGTKLEIK

SEQ ID NO: 1041 - protein, 107 aa, Artificial Sequence
  Synthetic Construct
DIQMTQSPSSLSASVGDRVTITCRASQGISSWLAWYQQKPEKAPKSLIYAASSLQSGVPSRFSGSGSGTDFTLTISSLQPEDFATYYCQQYNSYPPTFGQGTKLEIK

SEQ ID NO: 1042 - protein, 107 aa, Artificial Sequence [sequence omitted]

SEQ ID NO: 1043 - protein, 112 aa, Artificial Sequence
  Synthetic Construct
DVVMTQSPLSLPVTLGQPASISCRSSQSLVYSDGNTYLNWFQQRPGQSPRRLIYKVSNRDSGVPDRFSGSGSGTDFTLKISRVEAEDVGVYYCMQGTHWPLTFGGGTKVEIK

SEQ ID NO: 1044 - protein, 112 aa, Artificial Sequence [sequence omitted]

SEQ ID NO: 1045 - protein, 107 aa, Artificial Sequence
  Synthetic Construct
DIQMTQSPSSLSASVGDRVTITCRASQAVSSAVAWYQQKPGKAPKLLIYSASHRYTGVPSRFSGSGSGTDFTLTISSLQPEDFATYYCQESYSTPWTFGQGTKVEIK

SEQ ID NO: 1046 - protein, 113 aa, Artificial Sequence [sequence omitted]

SEQ ID NO: 1047 - protein, 108 aa, Artificial Sequence
  Synthetic Construct
DIQMTQSPSSLSASVGDRVTITCRASQDINSYLSWFQQKPGKAPKSLIVRANRLVDGVPSRFSGSGSGQDYSLTISSLQPEDFATYYCLQYDAFPPYTFGQGTKLEIK

SEQ ID NO: 1048 - protein, 107 aa, Artificial Sequence [sequence omitted]

SEQ ID NO: 1049 - protein, 106 aa, Artificial Sequence
  Synthetic Construct
EIVLTQSPSSLSASVGDRVTITCSARSSVSYMHWFQQKPGKAPKLWIYRTSNLASGVPSRFSGSGSGTSYCLTINSLQPEDFATYYCQQRSSFPLTFGGGTKLEIK

SEQ ID NO: 1050 - protein, 112 aa, Artificial Sequence
  Synthetic Construct
DIQMTQSPSSLSASVGDRVTITCRSSQSIVHSVGNTFLEWYQQKPGKAPKLLIYKVSNRFSGVPSRFSGSGSGTDFTLTISSLQPEDFATYYCFQGSQFPYTFGQGTKVEIK

SEQ ID NO: 1051 - protein, 112 aa, Artificial Sequence
  Synthetic Construct
DVVMTQSPLSLPVTLGQPASISCKSSQSLLDSDGKTFLNWFQQRPGQSPRRLIYLVSKLDSGVPDRFSGSGSGTDFTLKISRVEAEDVGVYYCWQGTHFPYTFGQGTRLEIK

SEQ ID NO: 1052 - protein, 111 aa, Artificial Sequence [sequence omitted]

SEQ ID NO: 1053 - protein, 112 aa, Artificial Sequence
  Synthetic Construct
DVVMTQSPLSLPVTLGQPASISCKSSQSLLYSDAKTYLNWFQQRPGQSPRRLIYQISRLDPGVPDRFSGSGSGTDFTLKISRVEAEDVGVYYCLQGTHYPVLFGQGTRLEIK

SEQ ID NO: 1054 - protein, 107 aa, Artificial Sequence
  Synthetic Construct
DIVMSQSHKFMSTSVGDRVSITCKASQDVGTAVAWYQQNPGQSPKFLIYWASTRHTGVPDRFTGSGSGTDFTLTITNVQSEDLADYFCQQYSSYPLTFGAGTSLELK

SEQ ID NO: 1055 - protein, 112 aa, Artificial Sequence
  Synthetic Construct
DIQMTQSPSSLSASVGDRVTITCRSSQSLVHNNANTYLHWYQQKPGKAPKLLIYKVSNRFSGVPSRFSGSGSGTDFTLTISSLQPEDFATYYCSQNTLVPWTFGQGTKVEIK

SEQ ID NO: 1056 - protein, 107 aa, Artificial Sequence
  Synthetic Construct
DIQMTQTTSSLSASLGDRVTISCRASQDISNYLNWYQQKPDGTVKLLIYYTSRLHSGVPSRFSGSGSGTDYSLTISNLEQEDIATYFCQQGNTLPWTFGGGTKLEIK

SEQ ID NO: 1057 - protein, 108 aa, Artificial Sequence [sequence omitted]

SEQ ID NO: 1058 - protein, 112 aa, Artificial Sequence
  Synthetic Construct
QSALTQPRSVSGSPGQSVTISCTGTSSDIGGYNFVSWYQQHPGKAPKLMIYDATKRPSGVPDRFSGSKSGNTASLTISGLQAEDEADYYCCSYAGDYTPGVVFGGGTKLTVL

SEQ ID NO: 1059 - protein, 107 aa, Artificial Sequence [sequence omitted]

SEQ ID NO: 1060 - protein, 107 aa, Artificial Sequence [sequence omitted]

SEQ ID NO: 1061 - protein, 112 aa, Artificial Sequence
  Synthetic Construct
DIVMTQSPDSLAVSLGERATINCKSSHSVLYSSNQKNYLAWYQQKPGQPPKLLIYWASTRESGVPDRFSGSGSGTDFTLTISSLQAEDVAVYYCHQYLSSLTFGQGTKLEIK

SEQ ID NO: 1062 - protein, 107 aa, Artificial Sequence [sequence omitted]

SEQ ID NO: 1063 - protein, 108 aa, Artificial Sequence
  Synthetic Construct
EIVMTQSPATLSVSPGERATLSCRASQSVDSNLAWYRQKPGQAPRLLIYGASTRATGIPARFSGSGSGTEFTLTISSLQSEDFAVYYCQQYINWPPITFGQGTRLEIK

SEQ ID NO: 1064 - protein, 108 aa, Artificial Sequence
  Synthetic Construct
EIVLTQSPDTISLSPGERATLSCRASQSISSIYLAWYQQKPGQAPRLLIYGASSRVTGIPDRFSVSGSGTDFTLTISRLEPEDFAVYYCQHYGISPFTFGPGTKVDIR

SEQ ID NO: 1065 - protein, 107 aa, Artificial Sequence
  Synthetic Construct
DIQLTQSPSTLSASVGDSVTITCRASEGVDRWLAWYQQKPGRAPKLLIYDASTLQSGVPSRFSGSGSGTEFSLTISSLQPDDVATYYCQHFWGTPYTFGQGTKLEIK

SEQ ID NO: 1066 - protein, 107 aa, Artificial Sequence [sequence omitted]

SEQ ID NO: 1067 - protein, 107 aa, Artificial Sequence
  Synthetic Construct
AIRMTQSPSSFSASTGDRVTITCRASQDIRNYVAWYQQKSGKAPKFLIYAASTLQSGVPSRFSGSGSGTDFTLTINSLQSEDFATYYCQQYYNSPPTFGQGTRVEIT

SEQ ID NO: 1068 - protein, 107 aa, Artificial Sequence [sequence omitted]

SEQ ID NO: 1069 - protein, 111 aa, Artificial Sequence [sequence omitted]

SEQ ID NO: 1070 - protein, 107 aa, Artificial Sequence
  Synthetic Construct
EIVMTQSPATLSVSPGERATLSCKASQSVSNDVVWYQQKPGQAPRLLIYYASNRYTGIPARFSGSGSGTEFTLTISSLQSEDFAVYYCQQDYTSPWTFGQGTKLEIK

SEQ ID NO: 1071 - protein, 107 aa, Artificial Sequence
  Synthetic Construct
DIQLTQSPSSLSASVGDRVSITCKASQDVSIAVAWYQQKPGKAPKLLIYSASYRYTGVPDRFSGSGSGTDFTLTISSLQPEDFAVYYCQQHYITPLTFGAGTKVEIK

SEQ ID NO: 1072 - protein, 107 aa, Artificial Sequence
  Synthetic Construct
DIQMTQSPSSLSASIGDRVTITCKASQDINSYLSWFQQKPGKAPKLLIYRANRLVDGVPSRFSGSGSGTDYTLTISSLQPEDFAVYYCLQYDEFPYTFGGGTKLEIK

SEQ ID NO: 1073 - protein, 107 aa, Artificial Sequence
  Synthetic Construct
DIQMTQSPASLSVSVGETVTITCRASENIYSNLAWYQQKQGKSPQLLVYAATNLADGVPSRFSGSGSGTQYSLKINSLQSEDFGSYYCQHFWGTPYTFGGGTRLEIK

SEQ ID NO: 1074 - protein, 111 aa, Artificial Sequence [sequence omitted]

SEQ ID NO: 1075 - protein, 113 aa, Artificial Sequence
  Synthetic Construct
DIVLSQSPSSLVVSVGEKVTMSCKSSQSLLYSRNQKNYLAWYQQKPGQSPKVLIYWASTRESGVPDRLTGSGSGTDFTLTISSVKAEDLAVYYCQQYYSYPLTFGAGTKLELK

SEQ ID NO: 1076 - protein, 108 aa, Artificial Sequence [sequence omitted]

SEQ ID NO: 1077 - protein, 106 aa, Artificial Sequence [sequence omitted]

SEQ ID NO: 1078 - protein, 112 aa, Artificial Sequence
  Synthetic Construct
DIVMTQTPLSLSVTPGQPASISCRSSKSLLHSNGNTYLYWFLQKPGQSPQFLIYRMSNLASGVPDRFSGSGSGTDFTLKISRVEAEDVGVYYCMQHLEYPYTFGGGTKVEIK

SEQ ID NO: 1079 - protein, 106 aa, Artificial Sequence
  Synthetic Construct
EIVLTQSPATLSLSPGERATLSCSASISVSYMYWYQQKPGQAPRLLIYDMSNLASGIPARFSGSGSGTDFTLTISSLEPEDFAVYYCMQWSGYPYTFGGGTKVEIK

SEQ ID NO: 1080 - protein, 107 aa, Artificial Sequence
  Synthetic Construct
DIQMTQSPSSLSASVGDRVTITCKASDLIHNWLAWYQQKPGKAPKLLIYGATSLETGVPSRFSGSGSGTDFTLTISSLQPEDFATYYCQQYWTTPFTFGQGTKVEIK

SEQ ID NO: 1081 - protein, 112 aa, Artificial Sequence
  Synthetic Construct
DVVMTQSPLSLPVTLGQPASISCRSSQSLIYSDGNAYLHWFLQKPGQSPRLLIYKVSNRFSGVPDRFSGSGSGTDFTLKISRVEAEDVGVYYCSQSTHVPWTFGQGTKVEIK

SEQ ID NO: 1082 - protein, 113 aa, Artificial Sequence
  Synthetic Construct
DIQMTQRPDSLSASVGDRVTMSCKSSQSLLNSGDQKNYLTWYQQKPGQPPKLLIYWASTGESGVPDRFSGSGSGTDFTFTISSLQPEDIATYYCQNDYSYPWTFGQGTKVEIK

SEQ ID NO: 1083 - protein, 107 aa, Artificial Sequence [sequence omitted]

SEQ ID NO: 1084 - protein, 107 aa, Artificial Sequence [sequence omitted]

SEQ ID NO: 1085 - protein, 108 aa, Artificial Sequence
  Synthetic Construct
DIVLTQSPATLSLSPGERATLSCRASQSVRSNYLAWYQQKPGQAPRLLIYGASSRATGVPARFSGSGSGTDFTLTISSLEPEDFAVYYCQQYSNFPITFGQGTKVEIK

SEQ ID NO: 1086 - protein, 112 aa, Artificial Sequence
  Synthetic Construct
DIVMTQAAPSVPVTPGESVSISCRSSKSLLHSNGNTYLYWFLQRPGQSPQLLIYRMSNLASGVPDRFSGSGSGTAFTLRISRVEAEDVGVYYCMQHLEYPLTFGAGTKLELK

SEQ ID NO: 1087 - protein, 106 aa, Artificial Sequence [sequence omitted]

SEQ ID NO: 1088 - protein, 108 aa, Artificial Sequence
  Synthetic Construct
EIVLTQSPATLSLSPGERATLSCRASQSVSSYLAWYQQKPGQAPRLLIYDASKRATGIPARFSGSGSGTDFTLTISSLEPEDFAVYYCQQRSKWPPWTFGQGTKVESK

SEQ ID NO: 1089 - protein, 108 aa, Artificial Sequence
  Synthetic Construct
SYELTQPLSVSVALGQTARITCSGDSIPNYYVYWYQQKPGQAPVLVIYDDSNRPSGIPERFSGSNSGNTATLTISRAQAGDEADYYCQSFDSSLNAEVFGGGTKLTVL

SEQ ID NO: 1090 - protein, 108 aa, Artificial Sequence
  Synthetic Construct
SYVLTQPPSVSVAPGQTARITCGGNNLGSKSVHWYQQKPGQAPVLVVYDDSDRPSWIPERFSGSNSGNTATLTISRGEAGDEADYYCQVWDSSSDHVVFGGGTKLTVL

SEQ ID NO: 1091 - protein, 106 aa, Artificial Sequence [sequence omitted]

SEQ ID NO: 1092 - protein, 107 aa, Artificial Sequence
  Synthetic Construct
VIQLTQSPSSLSASVGDRVTITCRASQGISRALAWYQQKPGKGPKLLIYDASSLESGVPSRFSGSGSGTDFTLTISSLQPEDFATYYCQQFNSYPLTFGGGTKVEIK

SEQ ID NO: 1093 - protein, 107 aa, Artificial Sequence
  Synthetic Construct
DIQMTQSPPSLSASAGDRVTITCRASQGISSRLAWYQQKPEKAPKSLIYAASSLQSGVPSRFSGSGSGTDFTLTISSLQPEDFATYYCQQYNSYPYTFGQGTKLEIK

SEQ ID NO: 1094 - protein, 111 aa, Artificial Sequence
  Synthetic Construct
QSVLTQSPSASGTPGQRVTISCSGGSSNIGSNTVNWYQQFPGAAPKLLIYTNNQRPSGVPDRFSGSKSGTSASLAISGLQSEDEADYYCATWDDSLNGLYVFGTGTKVTVL

SEQ ID NO: 1095 - protein, 108 aa, Artificial Sequence
  Synthetic Construct
DIQMTQSPSSLSASVGDRVSITCRPSQSFSRYINWYQQKPGKAPKLLIHAASSLVGGVPSRFSGSGSGTDFTLTISSLQPEDFATYYCQQTYSNPPITFGQGTRLEMK

SEQ ID NO: 1096 - protein, 108 aa, Artificial Sequence
  Synthetic Construct
SYVLTQPPSVSVAPGKTARITCGGNIIGSKLVHWYQQKPGQAPVLVIYDDGDRPSGIPERFSGSNSGNTATLTISRVEAGDEADYYCQVWDTGSDPVVFGGGTKLTVL

SEQ ID NO: 1097 - protein, 107 aa, Artificial Sequence [sequence omitted]

SEQ ID NO: 1098 - protein, 111 aa, Artificial Sequence
  Synthetic Construct
DIVMTQSPDSLAVSLGERATINCRASKSVSTSGYSYIYWYQQKPGQPPKLLIYLASILESGVPDRFSGSGSGTDFTLTISSLQAEDVAVYYCQHSRELPWTFGQGTKVEIK

SEQ ID NO: 1099 - protein, 107 aa, Artificial Sequence
  Synthetic Construct
DIQMTQSPSSLSASVGDRVTITCRASQSINSYLDWYQQKPGKAPKLLIYAASSLQSGVPSRFSGSGSGTDFTLTISSLQPEDFATYYCQQYYSTPFTFGPGTKVEIK

SEQ ID NO: 1100 - protein, 107 aa, Artificial Sequence
  Synthetic Construct
DIQMTQSPASLSASVGDRVTITCRASQDISDYLAWYQQKPGKIPRLLIYTTSTLQSGVPSRFRGSGSGTDFTLTISSLQPEDVATYYCQKYDSAPLTFGGGTKVEIK

SEQ ID NO: 1101 - protein, 107 aa, Artificial Sequence
  Synthetic Construct
DIQMTQSPSSLSASVGDRVTITCRASQGISSWLAWYQQKPEKAPKSLIYAASSLQSGVPSRFSGSGSGTDFTLTISSLQPEDFVTYYCQQYNSYPRTFGQGTKVEIK

SEQ ID NO: 1102 - protein, 109 aa, Artificial Sequence
  Synthetic Construct
EIVLTQSPATLSLSPGERATLSCRASQSVSSYLAWYQQKPGQAPRLLIYDASNRATGIPARFSGSGSGTDFTLTISSLEPEDFAVYYCQQRSNWPPALTFCGGTKVEIK

SEQ ID NO: 1103 - protein, 107 aa, Artificial Sequence
  Synthetic Construct
DIQMTQSPSSLSASVGDRVTINCKASQDINSYLSWFQQKPGKAPKTLIYRANRLVDGVPSRFSGSGSGQDYTLTISSLQPEDFATYYCLQYDEFPLTFGGGTKVEIK

SEQ ID NO: 1104 - protein, 113 aa, Artificial Sequence
  Synthetic Construct
DIQMTQSPSSLSASVGDRVTITCKSSQSLLYRSNQKNYLAWYQQKPGKAPKLLIYWASTRESGVPSRFSGSGSGTDFTLTISSLQPEDFATYYCQQYYNYPRTFGQGTKVEIK

SEQ ID NO: 1105 - protein, 107 aa, Artificial Sequence
  Synthetic Construct
DIELTQPPSVSVAPGQTARISCSGDNIGSFYVHWYQQKPGQAPVLVIYDKSNRPSGIPERFSGSNSGNTATLTISGTQAEDEADYYCQSYANTLSLVFGGGTKLTVL

SEQ ID NO: 1106 - protein, 110 aa, Artificial Sequence
  Synthetic Construct
QPGLTQPPSVSVAPGQTARITCGGNNIGSKSVHWYQQKPGQAPVLVVYDDSDRPSGIPERFSGSNSGNTATLTISRVEAGDEADYYCQVWDSSSDHYVFGTGTKVTVLSS

SEQ ID NO: 1107 - protein, 107 aa, Artificial Sequence
  Synthetic Construct
DIQMTQSPSSLSASVGDRVTITCRASQGISRWLAWYQQKPEKAPKSLIYAASSLQSGVPSRFSGSGSGTDFTLTISSLQPEDFATYYCQQYNTYPRTFGQGTKVEIK

SEQ ID NO: 1108 - protein, 106 aa, Artificial Sequence
  Synthetic Construct
DFVMTQSPAFLSVTPGEKVTITCSAQSSVNYIHWYQQKPDQAPKKLIYDTSKLASGVPSRFSGSGSGTDYTFTISSLEAEDAATYYCQQWTTNPLTFGQGTKVEIK

SEQ ID NO: 1109 - protein, 112 aa, Artificial Sequence [sequence omitted]

SEQ ID NO: 1110 - protein, 106 aa, Artificial Sequence
  Synthetic Construct
DIQLTQSPSSLSASVGDRVTMTCRASSSVSYIHWFQQKPGKAPKPWIYATSNLASGVPVRFSGSGSGTDYTFTISSLQPEDIATYYCQQWTSNPPTFGGGTKLEIK

SEQ ID NO: 1111 - protein, 107 aa, Artificial Sequence
  Synthetic Construct
DIQMTQSPSSLSASVGDRVTITCRASQYFSSYLAWYQQKPGKAPKLLIYGASSRASGVPSRFSGSGSGTDFTLTISSLQPEDFATYYCQQYLGSPPTFGQGTKVEIK

SEQ ID NO: 1112 - protein, 106 aa, Artificial Sequence [sequence omitted]

SEQ ID NO: 1113 - protein, 111 aa, Artificial Sequence
  Synthetic Construct
DIVMTQSPDSLAVSLGERATINCRASKSVSTSGYSFMHWYQQKPGQPPKLLIYLASNLESGVPDRFSGSGSGTDFTLTISSLQAEDVAVYYCQHSREVPWTFGQGTKVEIK

SEQ ID NO: 1114 - protein, 110 aa, Artificial Sequence
  Synthetic Construct
DIVLTQPPSVSGAPGQRVTISCSGSSSNIGSNSVSWYQQLPGTAPKLLIYDNSKRPSGVPDRFSGSKSGTSASLAITGLQSEDEADYYCQSRDTYGYYWVFGGGTKLTVL

SEQ ID NO: 1115 - protein, 107 aa, Artificial Sequence [sequence omitted]

SEQ ID NO: 1116 - protein, 107 aa, Artificial Sequence [sequence omitted]

SEQ ID NO: 1117 - protein, 118 aa, Artificial Sequence
  Synthetic Construct
EVQLVQSGAEVKKPGESLKISCKGSGYSFTSYWIGWVRQMPGKGLEWMGVIYPGDSYTRYSPSFQGQVTISADKSISTAYLQWSSLKASDTAMYYCARMPNWGSLDHWGQGTLVTVSS

SEQ ID NO: 1118 - protein, 104 aa, Artificial Sequence
  Synthetic Construct
EIVLTQSPGTLSLSPGERATLSCRASQSISSSYLAWYQQKPGQAPRLLIYGASSRATGIPDRFSGSGSGTDFTLTISRLEPEDFAVYYCQQYASFGQGTKVEIK

SEQ ID NO: 1119 - protein, 20 aa, Artificial Sequence
  Synthetic Construct
METDTLLLWVLLLWVPGSTG

SEQ ID NO: 1120 - protein, 232 aa, Artificial Sequence
  Synthetic Construct
EPKSCDKTHTCPPCPAPELLGGPSVFLFPPKPKDTLMISRTPEVTCVVVDVSHEDPEVKFNWYVDGVEVHNAKTKPREEQYNSTYRVVSVLTVLHQDWLNGKEYKCKVSNKALPAPIEKTISKAKGQPREPQVYTLPPSREEMTKNQVSLTCLVKGFYPSDIAVEWESNGQPENNYKTTPPVLDSDGSFFLYSKLTVDKSRWQQGNVFSCSVMHEALHNHYTQKSLSLSPGK

SEQ ID NO: 1121 - protein, 229 aa, Artificial Sequence
  Synthetic Construct
ESKYGPPCPPCPAPEFLGGPSVFLFPPKPKDTLMISRTPEVTCVVVDVSQEDPEVQFNWYVDGVEVHNAKTKPREEQFNSTYRVVSVLTVLHQDWLNGKEYKCKVSNKGLPSSIEKTISKAKGQPREPQVYTLPPSQEEMTKNQVSLTCLVKGFYPSDIAVEWESNGQPENNYKTTPPVLDSDGSFFLYSRLTVDKSRWQEGNVFSCSVMHEALHNHYTQKSLSLSLGK

SEQ ID NO: 1122 - protein, 227 aa, Artificial Sequence
  Synthetic Construct
VPRDCGCKPCICTVPEVSSVFIFPPKPKDVLTITLTPKVTCVVVDISKDDPEVQFSWFVDDVEVHTAQTQPREEQFNSTFRSVSELPIMHQDWLNGKEFKCRVNSAAFPAPIEKTISKTKGRPKAPQVYTIPPPKEQMAKDKVSLTCMITDFFPEDITVEWQWNGQPAENYKNTQPIMNTNGSYFVYSKLNVQKSNWEAGNTFTCSVLHEGLHNHHTEKSLSHSPGK
